(19) United States
(12) Patent Application Publication
(10) Pub. No.: US 2021/0231663 A1
(43) Pub. Date: Jul. 29, 2021

(54) MELANOMA CHECKPOINT INHIBITOR DETECTION AND TREATMENT

(71) Applicant: ONCIMMUNE GERMANY GMBH, Dortmund (DE)

(72) Inventors: Petra BUDDE, Dortmund (DE); Peter SCHULZ-KNAPPE, Hemmingen (DE); Hans-Dieter ZUCHT, Hannover (DE)

(73) Assignee: ONCIMMUNE GERMANY GMBH, Dortmund (DE)

(21) Appl. No.: 16/772,512

(22) PCT Filed: Dec. 10, 2018
(86) PCT No.: PCT/EP2018/084245

§ 371 Date: Jun. 12, 2020

Related U.S. Application Data
(60) Provisional application No. 62/747,181, filed on Oct. 18, 2018.
(60) Provisional application No. 62/597,720, filed on Dec. 12, 2017.

(51) Int. Cl. G01N 33/574; G01N 33/564; C07K 16/28

(52) U.S. Cl. CPC G01N 33/5743; C07K 16/2818; G01N 33/564

(57) ABSTRACT

Biomarkers are provided for predicting an irAE response associated with administration of anti-CTLA-4 antibodies (i.e. ipilumamb) and antibodies disrupting the PD-1/PD-L1 pathway (i.e. nivolumab or pembrolizumab) for treating melanoma. Methods of treatment incorporating such biomarkers are also provided.

### FIELD OF THE INVENTION

[0001] Biomarkers are provided for predicting an irAE response associated with administration of anti-CTLA-4 antibodies (i.e. ipilumamb) and antibodies disrupting the PD-1/PD-L1 pathway (i.e. nivolumab or pembrolizumab) for treating melanoma. Methods of treatment incorporating such biomarkers are also provided. Antibody responses towards tumor-associated antigens and self-antigens may have the potential to predict response, overall survival, and progression-free survival, receiving checkpoint inhibitor treatments.

### BACKGROUND OF THE INVENTION

[0002] Melanoma, also known as malignant melanoma, is a type of skin cancer that originates from the pigment-containing melanocytes. The main factors that predispose to the development of melanoma seem to be connected with overexposure to ultraviolet sunlight and a history of sunburn.

[0003] Melanoma is the least common but the most deadly skin cancer, accounting for only about 1% of all cases, but the dangerous form of skin cancer. According to the World Health Organization (WHO), about 132,000 melanoma skin cancers occur globally each year (http://www.who.int/uv/faq/skincancer/en/index1.html).

[0004] The survival rate for patients with melanoma depends on the thickness of the primary melanoma, whether the lymph nodes are involved, and whether the patient has developed metastasis at distant sites. The majority of patients initially present with stage I or II (localized melanoma), 8% have stage III (regional disease; and 4% have stage IV disease (distant metastases).

[0005] Surgery is the main treatment option for most melanomas, and usually cures early-stage melanomas. For many decades, patients with metastatic melanoma had a very poor prognosis with a median survival time of 8-9 month. Standard of care for unresectable stage III disease or stage IV melanoma was classical therapies such as chemotherapy and radiation.

[0006] Recent progress in tumor immunology research has led to a fourth therapy option that consists of approaches to stimulate the human immune system to identify and destroy developing tumor (cancer immunotherapy or immune-oncology treatment).

[0007] An effective immune response to cancer is dependent on the capacity to detect the tumor as foreign. Many tumor cells express abnormal proteins and molecules, which in theory should be recognized by the immune system. Proteins, which are present in the tumor and elicit an immune response, are called tumor-associated antigens (TAA). The group of TAA comprises mutated proteins, overexpressed or aberrantly expressed proteins, proteins produced by oncogenic viruses, germline-expressed proteins, glycoproteins or proteins, which are produced in small quantities or are not exposed to the immune system. The immune response to TAA includes cellular processes as well as the production of antibodies against TAA that lead to the elimination of tumor cells.

[0008] However, following prolonged antigen exposure the tumor can develop immune escape mechanisms that induce functionally exhausted T effector cells. Such immune escape mechanisms include down-regulation of MHC class I molecules on tumor cells to evade antigen-presentation to T effector cells. Another immune escape mechanism of tumor cells is the upregulation of PD-1 ligand (PD-L1, also called B7-H1) on tumor cells, which inhibits the function of tumor-infiltrating T cells. Such negative regulators of immune response pathways are collectively called immune checkpoints.

[0009] The development of therapeutic antibodies that modulate immune inhibitory pathway has been a major breakthrough in the treatment of melanoma. Currently, antibodies targeting the cytotoxic T-lymphocyte-associated antigen 4 (CTLA-4) and programmed death 1 (PD-1)/PD-L1 pathway have demonstrated improved survival in patients with advanced melanoma.

[0010] Immune checkpoints are negative regulators of T-cell immune function, when bound to their respective ligands CD80/86 and programmed cell-death ligand 1 and 2 (PD-L1/PD-L2).

[0011] In addition, drugs targeting other checkpoints such as lymphocyte activation gene 3 protein (LAG3), T cell immunoglobulin mucin 3 (TIM-3), and IDO (Indoleamine 2,3-dioxygenase) are in development.

[0012] Ipilimumab (Yervoy), an inhibitor of CTLA-4, is approved for the treatment of advanced or unresectable melanoma.

[0013] Nivolumab (Opdivo) and pembrolizumab (Keytruda), both PD-1 inhibitors, are approved to treat patients with advanced or metastatic melanoma.

[0014] Anti-PD-L1 inhibitor avelumab (Bavencio) has received orphan drug designation by the European Medicines Agency for the treatment of gastric cancer in January 2017. The US Food and Drug Administration (FDA) approved it in March 2017 for Merkel-cell carcinoma, an aggressive type of skin cancer.

[0015] Despite the fact that checkpoint inhibitors have greatly improved the survival of advanced metastatic melanoma, non-responsiveness is also observed with only about 30% of patients appear to benefit from ipilimumab (anti-CTLA-4) treatment (Callahan et al., 2013). Compared with ipilimumab antibodies targeting PD-1, nivolumumab and pembrolizumab, have shown increased efficacy in metastatic melanoma. Efficacy may be even further increased when using a combination of nivolumumab with ipilimumab, which is also approved for metastatic melanoma and has demonstrated a 2-year overall survival rate of 63.8% (Hodi et al., 2016).

[0016] The potent ability of checkpoint inhibitors to activate the immune system can result in tissue specific inflammation characterized as immune-related adverse events (irAEs). The main side effects include diarrhea, colitis, hepatitis, skin toxicities, arthritis, diabetes, endocrinopathies such as hypophysitis and thyroid dysfunction (Spain et al., 2016). In particular, the combination therapy of nivolumab with ipilimumab led to a rate of high-grade irAEs of 55%, compared with 27% or 16% for nivolumab or ipilimumab monotherapy, respectively (Larkin et al., 2015). Although infrequent, one of the most concerning effects of ipilimumab and combination therapies of ipilumumab, is the development of severe and even life-threatening colitis.

[0017] Therefore, biomarkers are needed to predict both clinical efficacy and toxicity. Such biomarkers may guide patient selection for both monotherapy and combination therapy (Topalian et al., 2016).

[0018] There are apparent differences between the CTLA-4 and PD-1 pathways of the immune response. CTLA-4 acts more globally on the immune response by stopping potentially autoreactive T cells at the initial stage of naive T-cell activation, typically in lymph nodes. The PD-1 pathway regulates previously activated T cells at the later stages of an immune response, primarily in peripheral tissues (Buchbinder and Desai, 2016).

[0019] Substantial efforts have been undertaking to identify biomarkers for predicting which patient will respond best to immune checkpoint inhibition.

[0020] Given the mechanism of action of inhibiting the PD-1 pathway, several studies have evaluated the expression of the PD-L1 ligand in the tumor as a biomarker of clinical response. However, differences regarding the predictive value of PD-L1 expression have been found. This limits the current use of PD-L1 as a biomarker for predicting clinical response. The differences in the utility of PDL1 as biomarker may be caused by differences in the assay type used in different studies and by variable expression of PD-L1 during therapy (Manson et al., 2016).

[0021] Since checkpoint inhibition is typically viewed as enhancing the activity of effector T cells in the tumor and tumor environment, other biomarker approaches have focused on identifying TAA recognized by T cells. However, this approach is limited to exploratory analyses and is not practical in a routine laboratory setting because it requires patient-specific MHC reagents (Gulley et al., 2014).

[0022] A largely overlooked immune cell type in the context of immunotherapies are B cells, which can exert both anti-tumor and tumor-promoting effects by providing co-stimulatory signals and inhibitory signals for T cell activation, cytokines, and antibodies (Chiaruttini et al., 2017).

[0023] Furthermore, B cells also express the immune checkpoint regulators PD-1, PD-L1, and CTLA-4 (Chiaruttini et al., 2017). Thus, administration of agents that modulate immune checkpoint molecules may also have effects on B cell activation and autoantibody production.

[0024] B-cells produce anti-tumor antibodies, which can mediate antibody-dependent cellular cytoxicity (ADCC) of tumor cells and activation of the complement cascade. It is well established that many cancer types induce an antibody response, which can be used for diagnostic purposes. Although some cancer patients shown an antibody response to neo-antigens restricted to the tumor, the majority of antibodies in cancer patients are directed to self-antigens and are therefore autoantibodies (Bei et al., 2009). Breakthrough of tolerance and elevated levels of autoantibodies to self-antigens are also a prominent feature of many autoimmune diseases.

[0025] Thus, autoantibodies hold the potential to serve as biomarkers of a sustained humoral anti-tumor response/non-response and irAE in cancer patients treated with immunotherapeutic approaches.

[0026] Compared to biomarker strategies involving the identification of TAA-specific T-cells, the identification of autoantibodies can be performed using modern multiplex high-throughput screening approaches using minimal amounts of serum (Budde et al., 2016).

### BRIEF DESCRIPTION OF DRAWINGS

[0027] FIG. 1 illustrates a design of the cancer screen.

[0028] KEGG Pathway Analysis ((Kyoto Encyclopedia of Genes and Genomes) of human (has) proteins and antigens included in the cancer autoantibody screen. Proteins were selected to represent the following three categories: natural and autoimmune antigens, tumor-associated antigens, immune-related pathways and dysregulated pathways in autoimmune diseases, cancer signaling pathways, and proteins or genes overexpressed in different cancer types. The individual categories are listed on the x-axis, with the number of proteins per category is indicated at the y-axis.

[0029] FIG. 2 illustrates the number of analyzed patients and serum samples per immune-oncology treatment, or therapy.

[0030] Pre-treatment samples were collected before initiation of therapy, and post-treatment samples were collected at approximately 3 and 6 month following treatment.

[0031] FIG. 3 illustrates the best response according to RECIST 1.1 for 193 melanoma patients in percentage per immune-oncology therapy.

[0032] PD: progressive disease, SD: stable disease, PR: partial response, and CR: complete response.

[0033] FIG. 4 illustrates IrAE for 193 melanoma patients in percentage per immune-oncology therapy.

[0034] The graph shows the percentage of all irAEs per treatment as well detailed information of specific irAEs.

[0035] FIG. 5 illustrates Box-and-Whisker plots and ROC curves of three autoantibodies in melanoma patients and healthy controls (HC).

[0036] Box-and-Whisker plots and ROC (Receiver operating characteristics) curves of IgG autoantibody reactivities against CREB3L, CXCL5, and NME1 in serum samples of melanoma patients and healthy controls. Numbers at the y-axis indicate the log 2 Luminex Median Fluorescence Intensity values (MFI).

[0037] FIG. 6 illustrates Box-and-Whisker plots of autoantibodies predicting DCR or PD to immune-oncology treatment in general.

[0038] Box-and-Whisker plots show a comparison of pre-treatment IgG autoantibody levels of patients with progressive disease (PD) and those achieving disease control rate (DCR). DCR is defined as CR, PR, or SD. Numbers at the y-axis indicate the log 2 Luminex Median Fluorescence Intensity values (MFI).

[0039] Pretreatment samples of patients treated with different checkpoint inhibitors (FIG. 2) are jointly analyzed.

[0040] FIG. 7 illustrates Box-and-Whisker plots and ROC curves of two baseline autoantibodies predicting irAE in melanoma patients.

[0041] Box-and-Whisker plots and ROC curves show a comparison of pre-treatment IgG autoantibody levels of patients who develop or do not develop irAEs following treatment with checkpoint inhibitors. Pretreatment samples of patients treated with different checkpoint inhibitors (FIG. 2) are jointly analyzed.

[0042] FIG. 8 illustrates Box-and-Whisker Plots of baseline autoantibodies predicting DCR or PD to ipilimumab.

[0043] Box-and-Whisker plots show a comparison of pre-treatment IgG autoantibody levels of patients with progressive disease (PD) and those achieving disease control rate (DCR). DCR is defined as CR, PR, or SD. Numbers at the y-axis indicate the log 2 Luminex Median Fluorescence Intensity values (MFI). Baseline (T0) samples of patients treated with anti-CTLA-4 blocker ipilimumab are analyzed.

[0044] FIG. 9 illustrates Box-and-Whisker plots baseline autoantibodies predicting irAE in ipilimumab-treated patients.

[0045] Box-and-Whisker plots show a comparison of pre-treatment IgG autoantibody levels of patients who develop or do not develop irAEs following treatment with checkpoint inhibitors. Pre-treatment (T0) samples) of patients treated with anti-CTLA-4 blocker ipilimumab are analyzed.

[0046] FIG. 10 illustrates Box-and-Whisker plots of baseline autoantibodies predicting DCR or PD to pembrolizumab.

[0047] Box-and-Whisker plots show a comparison of pre-treatment IgG autoantibody levels of patients with progressive disease (PD) and those achieving disease control rate (DCR). DCR is defined as CR, PR, or SD. Numbers at the y-axis indicate the log 2 Luminex Median Fluorescence Intensity values (MFI). Baseline (T0) samples of patients treated with anti-PD-1/PD-L1 pathway blocker pembrolizumab are analyzed.

[0048] FIG. 11 illustrates Box-and-Whisker Plots baseline autoantibodies predicting irAE in pembrolizumab-treated patients.

[0049] Box-and-Whisker plots show a comparison of pre-treatment IgG autoantibody levels of patients who develop or do not develop irAEs following treatment with checkpoint inhibitors. Pre-treatment (T0 samples) of patients treated with anti-CTLA-4 blocker pembrolizumab are analyzed.

[0050] FIG. 12 illustrates study samples and data analysis workflow.

[0051] For data mining patients were regrouped into the following modeling cohorts: “all treatments”=complete patient cohort; “ipi-ever”=patients treated with ipi-mono, ipi/nivo or pembro with prior ipi; “ipi-mono”=ipi-mono cohort; “pembro-never-ipi”=pembro-treated patients without prior ipi.

[0052] FIG. 13 illustrates summary statistics for 47 autoantibodies predicting irAE and colitis.

[0053] Autoantibodies predicting an adverse event (colitis are irAE) are highlighted in black, whereas those predicting a reduced risk are shown in white.

[0054] FIG. 14 illustrates Kaplan Meier curves with confidence intervals of baseline autoantibodies and their targets predicting colitis.

[0055] Serum autoantibody levels were dichotomized and Kaplan Meier curves for patients with high and low autoantibody levels plotted. X-axis: Time (days), and Y-axis: Event probability.

[0056] FIG. 15 illustrates Kaplan Meier curves with confidence intervals of baseline autoantibodies and their targets predicting irAE.

[0057] Serum autoantibody levels were dichotomized and Kaplan Meier curves for patients with high and low autoantibody levels plotted. X-axis: Time (days), and Y-axis: Event probability.

[0058] FIG. 16 illustrates optimized marker combinations for prediction of colitis (A) and irAE (B).

[0059] Filled circles: Positive predictive autoantibodies, grey circles: negative predictive autoantibodies

### SUMMARY OF THE INVENTION

[0060] Treatment with anti-CTLA-4 (i.e. ipilimumab), antibodies disrupting the PD-1/PD-L1 pathway (i.e. nivolumab or pembrolizumab) or combination therapies have demonstrated efficacy in melanoma. However, not all patients benefit equally, and administration of these antibodies can be associated with irAE. Thus, biomarkers to predict the response are urgently needed. Antibody responses towards tumor-associated antigens and self-antigens may have the potential to predict response, overall survival, and progression-free survival, receiving checkpoint inhibitor treatments.

[0061] In one aspect is provided a method of identifying a tumor-associated antigen (TAA) for melanoma. A group of patients with melanoma is selected. Also, a group of patients who are healthy are selected. A sample from at least one patient in the group with melanoma is assayed for the level of an autoantibody to an antigen. The level of the autoantibody to an antigen in the group of patients with melanoma is compared to the level of the autoantibody in the group of healthy patients. The antigen is determined to be a TAA for melanoma if the level of the autoantibody to the antigen is statistically different between the group of patients with melanoma versus the group of healthy patients.

[0062] Additional aspects and embodiments are described below in the Detailed Description.

### DETAILED DESCRIPTION OF THE INVENTION

[0063] Unless defined otherwise, technical and scientific terms used herein have the same meaning as commonly understood by one of ordinary skill in the art to which this invention belongs.

[0064] The terms “a,” “an,” and “the” do not denote a limitation of quantity, but rather denote the presence of “at least one” of the referenced item. In this application and the claims, the use of the singular includes the plural unless specifically stated otherwise. In addition, use of “or” means “and/or” unless stated otherwise. Moreover, the use of the term “including”, as well as other forms, such as “includes” and “included”, is not limiting. Also, terms such as “element” or “component” encompass both elements and components comprising one unit and elements and components that comprise more than one unit unless specifically stated otherwise.

[0065] The term “about” or “approximately” means within a statistically meaningful range of a value. Such a range can be within an order of magnitude, preferably within 50%, more preferably within 20%, still more preferably within 10%, and even more preferably within 5% of a given value or range. The allowable variation encompassed by the term “about” or “approximately” depends on the particular system under study, and can be readily appreciated by one of ordinary skill in the art.

[0066] As used herein, “autoantibody” means an antibody produced by the immune system of a subject that is directed to, and specifically binds to an “autoantigen/self-antigen” or an “antigenic epitope” thereof. Specifically bind” and/or “specifically recognize” as used herein, refers to the higher affinity of a binding molecule for a target molecule compared to the binding molecule's affinity for non-target molecules. A binding molecule that specifically binds a target molecule does not substantially recognize or bind non-target molecules, e.g., an antibody “specifically binds” and/or “specifically recognize” another molecule, meaning that this interaction is dependent on the presence of the binding specificity of the molecule structure, e.g., an antigenic epitope.

[0067] As used herein, the term “epitope” refers to that portion of any molecule capable of being recognized by, and bound by, a T cell or an antibody (the corresponding antibody binding region may be referred to as a paratope), and/or eliciting an immune response. In general, epitopes consist of chemically active surface groupings of molecules, e.g., amino acids, and have specific three-dimensional structural characteristics as well as specific charge characteristics.

[0068] As used herein, the terms “diagnose” or “diagnosis” or “diagnosing” refers to determining the nature or the identity of a condition or disease or disorder, e.g., melanoma, detecting and/or classifying the melanoma in a subject. A diagnosis may be accompanied by a determination as to the severity of the melanoma. The term also encompasses assessing or evaluating the melanoma status (progression, regression, stabilization, response to treatment, etc.) in a patient known to have melanoma.

[0069] As used herein, the term “sample” refers to a sample obtained for evaluation in vitro. The sample can be any sample that is expected to contain antibodies and/or immune cells. The sample can be taken from blood, e.g., serum, peripheral blood, peripheral blood mononuclear cells (PBMC), whole blood or whole blood pre-treated with an anticoagulant such as heparin, ethylenediamine tetraacetic acid, plasma or serum. Sample can be pretreated prior to use, such as preparing plasma from blood, diluting viscous liquids, or the like; methods of treatment can also involve separation, filtration, distillation, concentration, inactivation of interfering components, and the addition of reagents.

[0070] Within the scope of this invention, the term “patient” is understood to mean any test subject (human or mammal), with the provision that the test subject is tested for melanoma.

[0071] As used herein, the terms “treat,” “treatment,” “treating,” or “amelioration” refer to therapeutic treatments, wherein the object is to reverse, alleviate, ameliorate, inhibit, slow down or stop the progression or severity of melanoma, an associated condition and/or a symptom thereof. The term “treating” includes reducing or alleviating at least one adverse effect or symptom of melanoma. Treatment is generally “effective” if one or more symptoms or clinical markers are reduced. Alternatively, or in addition, treatment is “effective” if the progression of a disease is reduced or halted.

[0072] In one aspect is provided a method of identifying a tumor-associated antigen (TAA) for melanoma cancer. A group of patients with melanoma is selected. Also, a group of patients who are healthy are selected. A sample from at least one patient in the group with melanoma is assayed for the level of an autoantibody to an antigen. The level of the autoantibody to an antigen in the group of patients with melanoma is compared to the level of the autoantibody in the group of healthy patients. The antigen is determined to be a TAA for melanoma if the level of the autoantibody to the antigen is statistically different between the group of patients with melanoma versus the group of healthy patients.

[0073] A patient or subject can be one who has been previously diagnosed with or identified as suffering from or under medical supervision for melanoma. A subject can be one who is diagnosed and currently being treated for, or seeking treatment, monitoring, adjustment or modification of an existing therapeutic treatment, or is at a risk of developing melanoma, e.g., due to family history, carrying alleles or genotype associated with melanoma, a history of excessive sun exposure, or development of moles and lesions associated with later development of melanoma.

[0074] Autoantibodies can be formed by a patient before melanoma progresses or otherwise shows symptoms. Early detection, diagnosis and also prognosis and (preventative) treatment would therefore be possible years before the visible onset of progression. Devices and means (arrangement, array, protein array, diagnostic tool, test kit) and methods described herein can enable a very early intervention compared with known methods, which considerably improves the prognosis and survival rates. Since the melanoma-associated autoantibody profiles change during the establishment and treatment/therapy of melanoma, the invention also enables the detection and the monitoring of melanoma at any stage of development and treatment and also monitoring within the scope of aftercare in the case of melanoma. The means according to the invention also allow easy handling at home by the patient himself and cost-effective routine precautionary measures for early detection and also aftercare.

[0075] Different patients may have different melanoma-associated autoantibody profiles, for example different cohorts or population groups differ from one another. Here, each patient may form one or more different melanoma-associated autoantibodies during the course of the development of melanoma and the progression of the disease of melanoma, that is to say also different autoantibody profiles. In addition, the composition and/or the quantity of the formed melanoma-associated autoantibodies may change during the course of the melanoma development and progression of the disease, such that a quantitative evaluation is necessary. The therapy/treatment of melanoma also leads to changes in the composition and/or the quantity of melanoma-associated autoantibodies. The large selection of melanoma-associated marker sequences according to the invention allows the individual compilation of melanoma-specific marker sequences in an arrangement for individual patients, groups of patients, certain cohorts, population groups, and the like. In an individual case, the use of a melanoma-specific marker sequence may therefore be sufficient, whereas in other cases at least two or more melanoma-specific marker sequences have to be used together or in combination in order to produce a meaningful autoantibody profile.

[0076] Compared with other biomarkers, the detection of melanoma-associated autoantibodies for example in the serum/plasma has the advantage of high stability and storage capability and good detectability. The presence of autoantibodies also is not subject to a circadian rhythm, and therefore the sampling is independent of the time of day, food intake and the like.

[0077] In addition, the melanoma-associated autoantibodies can be detected with the aid of the corresponding antigens/autoantigens in known assays, such as ELISA or Western Blot, and the results can be checked for this.

[0078] In some embodiments, the antigen is an antigen encoded by a gene listed in Table 1. In some embodiments, the antigen is an antigen encoded by a gene listed in Table 9. In some embodiments, the TAA is encoded by a gene listed in Table 2. In some embodiments, the antigen comprises an amino acid sequence of any one of SEQ ID NOS: 1-169.

[0079] In some embodiments, the assaying comprises contacting a portion of serum from the patient with a sample of an antigen immobilized onto a solid support. In some embodiments, the solid support is a bead. In some embodiments, the bead is a microsphere.

[0080] Various ways of performing the assay can be undertaken. A portion of serum from the patient with melanoma is contacted with a sample of an antigen. The antigen may be immobilized onto a solid support, in particular a filter, a membrane, a bead or small plate or bead, for example a magnetic or fluorophore-labelled bead, a silicon wafer, glass, metal, plastic, a chip, a mass spectrometry target or a matrix. A microsphere as a solid support may also be used. Multiple antigens may be coupled to multiple different solid supports and then arranged on an array.

[0081] The array may be in the form of a “protein array”, which in the sense of this invention is the systematic arrangement of melanoma-specific marker sequences on a solid support, wherein the melanoma-specific marker sequences are proteins or peptides or parts thereof, and wherein the support is preferably a solid support.

[0082] The sample comprising any of the TAAs, autoantigens, autoantibodies, are part of, found in, or otherwise present in, a bodily fluid. The bodily fluid may be blood, whole blood, blood plasma, blood serum, patient serum, urine, cerebrospinal fluid, synovial fluid or a tissue sample, for example from tumour tissue from the patient. These bodily fluids and tissue samples can be used for early detection, diagnosis, prognosis, therapy control and aftercare.

[0083] The level of a TAA, autoantibody or antigen is assayed by measuring the degree of binding between a sample and the antigen. Binding according to the invention, binding success, interactions, for example protein-protein interactions (for example protein to melanoma-specific marker sequence, such as antigen/antibody) or corresponding “means for detecting the binding success” can be visualised for example by means of fluorescence labelling, biotinylation, radio-isotope labelling or colloid gold or latex particle labelling in the conventional manner. Bound antibodies are detected with the aid of secondary antibodies, which are labelled using commercially available reporter molecules (for example Cy, Alexa, Dyomics, FITC or similar fluorescent dyes, colloidal gold or latex particles), or with reporter enzymes, such as alkaline phosphatase, horseradish peroxidase, etc. and the corresponding colorimetric, fluorescent or chemoluminescent substrates. A readout is performed for example by means of a microarray laser scanner, a CCD camera or visually.

[0084] Comparison may be performed by any number of statistical analyses, such as those described in Example 5 herein.

[0085] In another aspect is provided a method of identifying a tumor-associated antigen (TAA) as a marker for melanoma overall survival (MOS) or melanoma disease control rate (MDCR). A first group of patients with melanoma is selected who have statistically greater MOS or MDCR than a second group of patients with melanoma. The level of an autoantibody to the antigen in a sample from each of the patients in the first group is assayed. The level of the autoantibody to the antigen in each of the patients in the first group is compared to the level of the autoantibody in each of the patients in the second group. An antigen is determined to be a TAA marker for MOS or MDCR if the level of the autoantibody to the antigen is statistically different between the first group of patients and the second group of patients.

[0086] In some embodiments, the antigen is encoded by a gene listed in Table 3. In some embodiments, the TAA marker for MOS or MDCR is encoded by a gene listed in Table 3. In some embodiments, the assaying comprises b1) contacting a portion of serum from the patient with a sample of an antigen immobilized onto a solid support. In some embodiments, the solid support is a bead. In some embodiments, bead is a microsphere.

[0087] In another aspect is provided a method of identifying and treating a melanoma patient susceptible to an immune-related adverse event (irAE) after treatment with a checkpoint inhibitor. The level of one or more antigens encoded by a gene listed in Table 4 having a positive value for SAM Fold.Change is determined. The level of one or more antigens in a sample from a melanoma patient is assayed. The level of the one or more antigens is compared with an average level of the one or more antigens for a group of patients with melanoma. The checkpoint inhibitor is administered to the melanoma patient if:
[0088] (a) the level of the one or more antigens encoded by a gene listed in Table 4 having a value for SAM Fold.Change>1 in the patient is less than the average level of the one or more antigens encoded by a gene listed in Table 4 having a value for SAM Fold.Change>1 in the group of patients with melanoma, or
[0089] (b) the level of the one or more antigens encoded by a gene listed in Table 4 having a value for SAM Fold.Change<=1 in the patient is greater than the average level of the one or more antigens encoded by a gene listed in Table 4 having a value for SAM Fold.Change<=1 in the group of patients with melanoma.

[0090] In some embodiments, the antigen encoded by a gene listed in Table 4 is SDCBP or ATG4D.

[0091] In some embodiments, the number of the one or more antigens in (a) or the number of the one or more antigens in (b) exceeds 2. In some embodiments, the patient further has a reduced level of one or more antigens encoded by a gene listed in Table 4 having a value for SAM Fold.Change>1 as compared to the level in the group of patients with melanoma. In some embodiments, the assaying comprises b1) contacting a portion of serum from the patient with a sample of an antigen immobilized onto a solid support. In some embodiments, the solid support is a bead. In some embodiments, the bead is a microsphere. In some embodiments, the checkpoint inhibitor is Ipilimumab. In some embodiments, the checkpoint inhibitor is nivolumumab. In some embodiments, the checkpoint inhibitor is pembrolizumab.

[0092] In another aspect is provided a method of identifying and treating a melanoma patient with a checkpoint inhibitor. The level of one or more antigens encoded by a gene listed in Table 5 having a value for SAMR Fold.Change>1 is determined. The level of the one or more antigens is compared with an average level of the one or more antigens for a group of patients with melanoma. The checkpoint inhibitor is administered if the level of the one or more antigens in the patient is greater than the average level of the one or more antigens in the group of patients with melanoma.

[0093] In some embodiments, the antigen encoded by a gene listed in Table 5 is GPHN.

[0094] In some embodiments, the number of the one or more antigens exceeds 2. In some embodiments, the patient further has an increased level of one or more antigens encoded by a gene listed in Table 5 having a positive value R-value PFS or R-value OS as compared to the level in the group of patients with melanoma. In some embodiments, the assaying comprises contacting a portion of serum from the patient with a sample of an antigen immobilized onto a solid support. In some embodiments, the solid support is a bead. In some embodiments, the bead is a microsphere. In some embodiments, the checkpoint inhibitor is Ipilimumab. In some embodiments, the checkpoint inhibitor is nivolumumab. In some embodiments, the checkpoint inhibitor is pembrolizumab.

[0095] In another aspect is provided a method of identifying and treating a melanoma patient with a CTLA-4 inhibitor. The level of one or more antigens encoded by a gene listed in Table 6 having a value for SAMR Fold.Change>1 is determined. The level of the one or more antigens is compared with an average level of the one or more antigens for a group patients with melanoma. The CTLA-4 inhibitor is administered if the level of the one or more antigens in the patient is less than the average level of the one or more antigens in the group of patients with melanoma.

[0096] In some embodiments, the antigen encoded by a gene listed in Table 6 is SUMO2 or ATG4D.

[0097] In some embodiments, the number of the one or more antigens exceeds 2. In some embodiments, the assaying comprises contacting a portion of serum from the patient with a sample of an antigen immobilized onto a solid support. In some embodiments, the solid support is a bead. In some embodiments, the bead is a microsphere.

[0098] In another aspect is provided a method of identifying and treating a melanoma patient with a CTLA-4 inhibitor. The level of one or more antigens encoded by a gene listed in Table 6 having a value for SAMR Fold.Change<=1 is determined. The level of the one or more antigens is compared with an average level of the one or more antigens for a group of patients with melanoma. The CTLA-4 inhibitor is administered if the level of the one or more antigens in the patient is greater than the average level of the one or more antigens in the group of patients with melanoma.

[0099] In some embodiments, the number of the one or more antigens exceeds 2. In some embodiments, the assaying comprises contacting a portion of serum from the patient with a sample of an antigen immobilized onto a solid support. In some embodiments, the solid support is a bead. In some embodiments, the bead is a microsphere.

[0100] In another aspect is provided a method of identifying and treating a melanoma patient with a PD-1/PD-L1 pathway inhibitor. The level of one or more antigens encoded by a gene listed in Table 7 having a value for SAMR Fold.Change>1 is determined. The level of the one or more antigens is compared with an average level of the one or more antigens for a group of patients with melanoma. The PD-1/PD-L1 pathway inhibitor is administered if the level of the one or more antigens in the patient is greater than the average level of the one or more antigens in the group of patients with melanoma.

[0101] In some embodiments, the antigen encoded by a gene listed in Table 7 is LAMC1 or FGA.

[0102] In some embodiments, the number of the one or more antigens exceeds 2. In some embodiments, the patient further has an increased level of one or more antigens encoded by a gene listed in Table 7 having a positive value R-value PFS, R-value OS or R-value DCR as compared to the level in the group of patients with melanoma. In some embodiments, the assaying comprises contacting a portion of serum from the patient with a sample of an antigen immobilized onto a solid support. In some embodiments, the solid support is a bead. In some embodiments, the bead is a microsphere. In some embodiments, the PD-1/PD-L1 pathway inhibitor is pembrolizumab.

[0103] In another aspect is provided a method of identifying and treating a melanoma patient with pembrolizumab. The level of one or more antigens encoded by a gene listed in Table 8 having a value for SAMR Fold.Change<=1 is determined. The level of the one or more antigens is compared with an average level of the one or more antigens for a group of patients with melanoma. The pembrolizumab is administered if the level of the one or more antigens in the patient is greater than the average level of the one or more antigens in the group of patients with melanoma.

[0104] In some embodiments, the number of the one or more antigens exceeds 2. In some embodiments, the assaying comprises contacting a portion of serum from the patient with a sample of an antigen immobilized onto a solid support. In some embodiments, the solid support is a bead. In some embodiments, the bead is a microsphere.

[0105] In another aspect is provided a method of identifying and treating a melanoma patient with pembrolizumab. The level of one or more antigens encoded by a gene listed in Table 8 having a value for SAMR Fold.Change>1 is determined. The level of the one or more antigens is compared with an average level of the one or more antigens for a group of patients with melanoma. The pembrolizumab is administered if the level of the one or more antigens in the patient is less than the average level of the one or more antigens in the group of patients with melanoma.

[0106] In some embodiments, the antigen encoded by a gene listed in Table 8 is MITF, KRT7, FN1, CTSW, MIF, or SPA17.

[0107] In some embodiments, the number of the one or more antigens exceeds 2. In some embodiments, the assaying comprises contacting a portion of serum from the patient with a sample of an antigen immobilized onto a solid support. In some embodiments, the solid support is a bead. In some embodiments, the bead is a microsphere.

[0108] In another aspect is provided a method of identifying an antigen predictive of development of an irAE or colitis in a patient with melanoma who is treated with a checkpoint inhibitor comprising: a) selecting a first group of patients with melanoma who developed irAE or colitis after treatment with the checkpoint inhibitor, b) assaying the level of an autoantibody to an antigen in a sample from a patient in the first group who developed irAE or colitis, c) comparing the level of the autoantibody from the patient in the first group to the level of the autoantibody in a second group of patients with melanoma after treatment with the checkpoint inhibitor but did not develop irAE or colitis, d) determining that the antigen is predictive of development of an irAE or colitis if the level of the autoantibody to the antigen is statistically different between the first group of patients and the second group of patients.

[0109] In some embodiments, the antigen is an antigen encoded by a gene selected from SUMO2, MAGED2, PIAS3, MITF, GRP, AP2B1, PRKCI, BTBD2, AKT2, UBE2Z, L1CAM, LAMC1, GABARAPL2, RPLP0, SDCBP, AP1S1, CFB, FGA, IL3, IL4R, AMPH, LEPR, TP53, GPHN, IL23A, BAG6, BICD2, TMEM98, KDM4A, UBTF, CASP8, PCDH1, RELT, SPTBN1, MUM1, RPLP2, KRT7, FN1, MAGEB4, CTSW, NCOA1, MIF, SPA17, FGFR1, KRT19, TPM2, and ATG4D.

[0110] In some embodiments, the number of the one or more antigens exceeds 2. In some embodiments, the assaying comprises contacting a portion of serum from the patient with a sample of an antigen immobilized onto a solid support. In some embodiments, the solid support is a bead. In some embodiments, the bead is a microsphere.

[0111] In another aspect is provided a method of identifying an antigen predictive of development of colitis in a patient with melanoma who is treated with a checkpoint inhibitor comprising: a) selecting a first group of patients with melanoma who developed colitis after treatment with the checkpoint inhibitor, b) assaying the level of an autoantibody to an antigen in a sample from a patient in the first group who developed colitis, c) comparing the level of the autoantibody from the patient in the first group to the level of the autoantibody in a second group of patients with melanoma after treatment with the checkpoint inhibitor but did not develop colitis, d) determining that the antigen is predictive of development of colitis if the level of the autoantibody to the antigen is statistically different between the first group of patients and the second group of patients.

[0112] In some embodiments, the antigen is an antigen encoded by a gene selected from SUMO2, MAGED2, PIAS3, MITF, GRP, AP2B1, PRKCI, BTBD2, AKT2, UBE2Z, L1CAM, LAMC1, GABARAPL2, RPLP0, SDCBP, AP1S1, CFB, FGA, IL3, IL4R, AMPH, LEPR, TP53, GPHN, IL23A, BAG6, BICD2, TMEM98, KDM4A, UBTF, CASP8, PCDH1, RELT, SPTBN1, MUM1, RPLP2, KRT7, FN1, MAGEB4, CTSW, NCOA1, MIF, SPA17, FGFR1, KRT19, TPM2, and ATG4D.

[0113] In some embodiments, the number of the one or more antigens exceeds 2. In some embodiments, the assaying comprises contacting a portion of serum from the patient with a sample of an antigen immobilized onto a solid support. In some embodiments, the solid support is a bead. In some embodiments, the bead is a microsphere.

[0114] In another aspect is provided a method of identifying an antigen predictive of development of colitis in a patient with melanoma who is treated with a checkpoint inhibitor comprising: a) selecting a first group of patients with melanoma who developed colitis after treatment with the checkpoint inhibitor, b) assaying the level of an autoantibody to an antigen in a sample from a patient in the first group who developed colitis, c) comparing the level of the autoantibody from the patient in the first group to the level of the autoantibody in a second group of patients with melanoma after treatment with the checkpoint inhibitor but did not develop colitis, d) determining that the antigen is predictive of development of colitis if the level of the autoantibody to the antigen is statistically different between the first group of patients and the second group of patients.

[0115] In some embodiments, the antigen is an antigen encoded by a gene selected from SUMO2, MAGED2, PIAS3, MITF, GRP, AP2B1, PRKCI, BTBD2, AKT2, UBE2Z, L1CAM, LAMC1, GABARAPL2, RPLP0, SDCBP, AP1S1, CFB, FGA, IL3, IL4R, AMPH, LEPR, TP53, GPHN, IL23A, BAG6, BICD2, TMEM98, KDM4A, UBTF, CASP8, PCDH1, RELT, SPTBN1, MUM1.

[0116] In some embodiments, the antigen is an antigen encoded by a gene selected from SUMO2, MAGED2, PIAS3, MITF, GRP, AP2B1, PRKCI, BTBD2, AKT2, UBE2Z, L1CAM, LAMC1, GABARAPL2, RPLP0, SDCBP, AP1S1, CFB, FGA, IL3, IL4R, AMPH, LEPR, TP53, GPHN, IL23A, BAG6, BICD2, TMEM98, KDM4A, UBTF, CASP8, PCDH1, RELT, SPTBN1, MUM1.

[0117] In some embodiments, the checkpoint inhibitor is ipilumab and the antigen is an antigen encoded by a gene selected from MAGED2, PIAS3, MITF, PRKC1, and A2B1. In some embodiments, the checkpoint inhibitor is ipilumab and the antigen is an antigen encoded by a gene selected from AKT2, AP1S1, AP2B1, BAG6, BICD2, BTBD2, CASP8, CFB, FGA, GABARAPL2, GPHN, GRP, IL23A, IL3, IL4R, KDM4A, L1CAM, LAMC1, MAGED2, MITF, PCDH1, PIAS3, PRKCI, RELT, SDCBP, SPTBN1, SUMO2, TMEM98, UBE2Z, and UBTF. In some embodiments, the checkpoint inhibitor is ipilumab and the antigen is an antigen encoded by a gene selected from UBE2Z, L1CAM, GABARAPL2, CFB, IL3, RELT, FGA, and IL4R.

[0118] In some embodiments, the checkpoint inhibitor is a combination of ipulimuab and nivolumab and the antigen is an antigen encoded by a gene selected from PIAS3, SUMO2, MITF, GRP, PRKCI, AP2B1, SDCBP, PDCH1, SPTBN1, and UBTF. In some embodiments, the antigen is predictive of an increased risk of development of colitis and is encoded by a gene selected from RELT, CASP8, UBE2Z, IL4R, LAMC1, L1CAM, MITF. In some embodiments, the antigen is predictive of a decreased risk of development of colitis and is encoded by a gene selected from SUMO2, GRP, MIF.

[0119] In some embodiments, the number of the one or more antigens exceeds 2. In some embodiments, the assaying comprises contacting a portion of serum from the patient with a sample of an antigen immobilized onto a solid support. In some embodiments, the solid support is a bead. In some embodiments, the bead is a microsphere.

[0120] In another aspect is provided a method of identifying an antigen predictive of development of an irAE in a patient with melanoma who is treated with a checkpoint inhibitor comprising: a) selecting a first group of patients with melanoma who developed irAE after treatment with the checkpoint inhibitor, b) assaying the level of an autoantibody to an antigen in a sample from a patient in the first group who developed the irAE, c) comparing the level of the autoantibody from the patient in the first group to the level of the autoantibody in a second group of patients with melanoma after treatment with the checkpoint inhibitor but did not develop the irAE, d) determining that the antigen is predictive of development of the irAE if the level of the autoantibody to the antigen is statistically different between the first group of patients and the second group of patients.

[0121] In some embodiments, the antigen is predictive of an increased risk of development of the irAE and is encoded by a gene selected from IL4R, L1CAM, MITF, PIAS3, AP1S1, ATG4D, and RPLP2.

[0122] In some embodiments, the antigen is predictive of a decreased risk of development of the irAE and is encoded by a gene selected from MIF, NCOA1, FGFR1, and SDCBP.

[0123] In some embodiments, the checkpoint inhibitor is ipilumab and wherein the antigen is an antigen encoded by a gene selected from MAGED2, PIAS3, MITF, PRKC1, and A2B1.

[0124] In some embodiments, the number of the one or more antigens exceeds 2. In some embodiments, the assaying comprises contacting a portion of serum from the patient with a sample of an antigen immobilized onto a solid support. In some embodiments, the solid support is a bead. In some embodiments, the bead is a microsphere.

### EXAMPLES

[0125] The present invention is also described and demonstrated by way of the following examples. However, the use of these and other examples anywhere in the specification is illustrative only and in no way limits the scope and meaning of the invention or of any exemplified term. Likewise, the invention is not limited to any particular preferred embodiments described here. Indeed, many modifications and variations of the invention may be apparent to those skilled in the art upon reading this specification, and such variations can be made without departing from the invention in spirit or in scope. The invention is therefore to be limited only by the terms of the appended claims along with the full scope of equivalents to which those claims are entitled.

### Example 1: Production of Recombinant Autoantigens

[0126] Recombinant antigens were produced in Escherichia coli. Five cDNA libraries originating from different human tissues (fetal brain, colon, lung, liver, CD4 induced and non-induced T cells) were used for the recombinant production of human antigens. All of these cDNA libraries were oligo(dT)-primed, containing the coding region for an N-terminally located hexa-histidine-tag and were under transcriptional control of the lactose inducible promoter from E. coli]. Sequence integrity of the cDNA libraries was confirmed by 5′ DNA sequencing. Additionally, expression clones representing the full-length sequence derived from the human ORFeome collection were included. Individual antigens were designed in silico, synthesized chemically (Life Technologies, Carlsbad, USA) and cloned into the expression vector pQE30-NST fused to the coding region for the N-terminal-located His6-tag. Of the antigens. Recombinant gene expression was performed in E. coli SCS1 cells carrying plasmid pSE111 for improved expression of human genes. Cells were cultivated in 200 ml auto-induction medium (Overnight Express auto-induction medium, Merck, Darmstadt, Germany) overnight and harvested by centrifugation. Bacterial pellets were lysed by resuspension in 15 ml lysis buffer (6 M guanidinium-HCl, 0.1 M NaH2PO4, 0.01 M Tris-HCl, pH 8.0).

[0127] Soluble proteins were affinity-purified after binding to Protino® Ni-IDA 1000 Funnel Column (Macherey-Nagel, Düdren, Germany). Columns were washed with 8 ml washing buffer (8 M urea, 0.1 M NaH2PO4, 0.01 M Tris-HCl, pH 6.3). Proteins were eluted in 3 ml elution buffer (6 M urea, 0.1 M NaH2PO4, 0.01 M Tris-HCl, 0.5% (w/v) trehalose pH 4.5). Each protein preparation was transferred into 2D-barcoded tubes, lyophilized and stored at −20° C.

### Example 2: Selection of Antigens and Design of the Cancer Screen

[0128] A bead-based array was designed to screen for autoantibodies binding to tumor-associated antigens (TAA), proteins expressed from mutated or overexpressed cancer genes, and proteins playing a role in cancer signaling pathways. Furthermore, self-reactive antigens of normal humans and typical autoimmune antigens were included. In total, 842 potential antigens were selected. FIG. 1 shows the number of screening antigens per category.

### Example 3: Coupling of Antigens to Beads

[0129] For the production of bead-based arrays (BBA), the proteins were coupled to magnetic carboxylated color-coded beads (MagPlex™ microspheres, Luminex Corporation, Austin, Tex., USA). The manufacturer's protocol for coupling proteins to MagPlex™ microspheres was adapted to use liquid handling systems. A semi-automated coupling procedure of one BBA encompassed 384 single, separate coupling reactions, which were carried out in four 96-well plates. For each single coupling reaction, up to 12.5 μg antigen and 8.8×105 MagPlex™ beads of one color region (ID) were used. All liquid handling steps were carried out by either an eight-channel pipetting system (Starlet, Hamilton Robotics, Bonaduz, Switzerland) or a 96-channel pipetting system (Evo Freedom 150, Tecan, Mannderdorf, Switzerland). For semi-automated coupling, antigens were dissolved in H2O, and aliquots of 60 microliters were transferred from 2D barcode tubes to 96-well plates. MagPlex™ microspheres were homogeneously resuspended and each bead ID was transferred in one well of a 96-well plate. The 96-well plates containing the microspheres were placed on a magnetic separator (LifeSep™, Dexter Magnetic Technologies Inc., Elk Grove Village, USA) to sediment the beads for washing steps and on a microtiter plate shaker (MTS2/4, IKA) to facilitate permanent mixing for incubation steps.

[0130] For coupling, the microspheres were washed three times with activation buffer (100 mM NaH2PO4, pH 6.2) and resuspended in 120 μl activation buffer. To obtain reactive sulfo-NHS-ester intermediates, 15 μl 1-ethly-3-(3-dimethlyaminopropyl) carbodiimide (50 mg/ml) and 15 μl N-hydroxy-succinimide (50 mg/ml) were applied to microspheres. After 20 minutes incubation (900 rpm, room temperature (RT)) the microspheres were washed three times with coupling buffer (50 mM MES, pH 5.0) and resuspended in 65 μl coupling buffer. Immediately, 60 μl antigen solution was added to reactive microspheres and coupling took place over 120 minutes under permanent mixing (900 rpm, RT). After three wash cycles using washing buffer (PBS, 0.1% Tween20) coupled beads were resuspended in blocking buffer (PBS, 1% BSA, 0.05% ProClin300), incubated for 20 minutes (900 rpm, RT) and then transferred to be maintained at 4-8° C. for 12-72 h.

[0131] Finally, a multiplex BBA was produced by pooling 384 antigen-coupled beads.

### Example 4: Incubation of Serum Samples with Antigen-Coupled Beads

[0132] Serum samples were transferred to 2D barcode tubes and a 1:100 serum dilution was prepared with assay buffer (PBS, 0.5% BSA, 10% E. coli lysate, 50% Low-Cross buffer (Candor Technologies, Nürnberg, Germany)) in 96-well plates. The serum dilutions were first incubated for 20 minutes to neutralize any human IgG eventually directed against E. coli proteins. The BBA was sonicated for 5 minutes and the bead mix was distributed in 96-well plates. After three wash cycles with washing buffer (PBS, 0.05% Tween20) serum dilutions (50 μl) were added to the bead mix and incubated for 20 h (900 rpm, 4-8° C.). Supernatants were removed from the beads by three wash cycles, and secondary R-phycoerythrin-labeled antibody (5 μg/ml, goat anti-human, Dianova, Hamburg, Germany) was added for a final incubation of 45 minutes (900 rpm, RT). The beads were washed three times with washing buffer (PBS, 0.1% Tween20) and resuspended in 100 μl sheath fluid (Luminex Corporation). Subsequently, beads were analyzed in a FlexMap3D device for fluorescent signal readout (DD gate 7.500-15.000; sample size: 80 μl; 1000 events per bead ID; timeout 60 sec). The binding events were displayed as median fluorescence intensity (MFI). Measurements were disregarded when low numbers of bead events (<30 beads) were counted per bead ID.

### Example 5: Statistical Analysis

[0133] Statistical analysis was performed to identify biomarkers associated with the effectiveness and side effects of immune-oncology therapy. Autoantibody levels were correlated with overall survival (OS), progression-free survival (OS), and irAE using Spearman's rank correlation test. In the case, when two groups were compared the permutation based statistical technique Significance of microarrays in the R-programming language (SAMR) was used (Tusher et al., 2001). The strength of differences between the two test groups is computed as SAMR score_d. Furthermore, receiver-operating characteristics were calculated to provide area under the curve (AUC) values for each antigen. The ROC curves were generated using the package pROC (Robin et al., 2011).

[0134] To evaluate the tumor response to treatment, the best overall response (BOR) was determined by RECIST v1.1 criteria and the disease control rate was calculated. The disease control rate (DCR) is the percentage of patients achieving complete response (CR), or partial response (PR) or stable disease (SD). To identify biomarkers that predict clinical response in in pre-treatment samples (T0), a responder was defined as with CR, PR, or SD and autoantibody profiles of patients with DCR compared to patients with progressive disease.

### Example 6: Collection of Serum Samples from Patients with Metastatic Melanoma Treated with Different Immune Checkpoint Inhibitors

[0135] Serum samples of metastatic melanoma patients treated with immune checkpoint inhibitors were collected at the National Center for Tumor Diseases (NCT, Heidelberg, Germany). Serum samples were collected prior to immune checkpoint inhibitor treatment (T0, baseline or pre-treatment sample) and at two time points during treatment (post-treatment samples). The T1 corresponds to 90 days (3 month) and the T2 samples corresponds to 180 days (6 month).

[0136] FIG. 2 shows the number of patients and samples per treatment group.

[0137] Patient data were provided on a standardized form including demographics (age, gender), the type of checkpoint inhibitor treatment, the date of therapy start, and best response according to “Response Evaluation Criteria in Solid tumors” (RECIST 1.1. criteria), graded into complete response (CR), partial response (PR), stable disease (SD), and progressive disease (PD) (Eisenhauer et al., 2009).

[0138] FIG. 3 shows the response categories (CR, PR, SD, and PD) achieved by patients treated with different checkpoint inhibitors.

[0139] Furthermore, details on immune-related adverse events (irAE) were recorded.

[0140] FIG. 4 shows the different irAE, which occurred following treatment with different checkpoint inhibitors. The highest percentage (75%) of irAE occurred during ipilimumab/nivolumab combination therapy. Colitis most frequently occurred during ipiliumab and ipilimumab/nivolumab combination therapy.

[0141] The survival time (overall survival, OS) was calculated as the time from start of treatment to death or the last contact date.

[0142] Progression-free survival (PFS) was calculate as the time from start of treatment to progression. When progression was not observed the time from start to death or last visit was calculated.

### Example 7: Characterization of the Autoantibody Response in Melanoma Patients

[0143] The presence of a tumor can induce a humoral immune response to tumor-associated antigens (TAA) and self-antigens. This autoantibody response may be utilized to characterize the immune-status of a cancer patients receiving immune-oncology therapy. Pre- and post-treatment serum samples from 193 melanoma patients treated with anti-CTLA-4 (ipilumumab), anti-PD-1 (nivolumab or pembrolizumab) or anti-CTLA-4/anti-PD-1 combination therapy were analyzed for the presence of autoantibodies directed towards 842 preselected tumor-associated antigens (TAA) and self-antigens.

[0144] Table 1 shows the autoantibody response of melanoma patients against 135 antigens. Markers correlating with different clinical endpoints are extracted and shown in separate tables (T). Table 1 includes the following antigens:

[0145] GRAMD4, TEX264, CREB3L1, NCBP3/C17orf85, FRS2, S100A8, TRAF3IP3, NOVA2, C15orf48; NMES1, MIF, CTAG1B, CAP2, CSNK2A1, IGF2BP2, GPHN, SDCBP, HSPA1B, SPTB, HES1, MMP3, PAPOLG, SNRPD1, SSB, XRCC5, XRCC6, EOMES, ERBB3, ATG4D, ELMO2, AKAP13, HSPA2, SMAD9, BIRC5, FGA, PDCD6IP, RPS6KA1, USB1, BCL7B, EIF3E, CENPH, GNG12, CCDC51, HUS1, HSPB1, KLKB1, LARP1, LGALS3BP, OGT, PECAM1, NRIP1, PPP1R2, IL36RN, RALY, S100A14, SNRNP70, SNRPA, MUC12, HIST2H2AA3, SIVA1, AQP4, RPLP2, SDC1, TRA2B, EGLN2, RAPGEF3, RPRM, NSD3/WHSC1L1, ATP13A2, CTSW, CXXC1, FADD, ACTB, MLLT6, ARRB1, CEACAM5, GSK3A, HDAC1, LAMC1, MSH2, MAZ, PTPRR, DFFA, DHFR, FLNA, CCNB1, SHC1, CALR, GRK6, GNAI2, FGFR1, CENPV, CEP131, PPP1R12A, CASP10, FOXO1, CPSF1, GRK2, AKT3, ANXA4, ATP1B3, BCR, CDR2L, NME1, CXCL13, CXCL5, DNAJC8, DUSP3, EEF2, MAGED1, EIF4E2, HSPD1, IL17A, MAPT, POLR3B, SIPA1L1, SUMO2, TRIP4, UBAP1, BTRC, EGFR, FN1, KRT7, LAMB2, MITF, PPL, SIGIRR, SPA17, SUFU, TOLLIP, TONSL, PLIN2, RFWD2, ABCB8, SQSTM1, and CTAG2.

[0146] TRA2B was tested as a post-translationally modified protein, in which the amino acid arginine was modified by citrullination or deamination into the amino acid citrulline.

[0147] The modified protein is referred to as “TRA2B_cit”. Autoantibodies binding to citrullinated antigens or peptides (ACPA) are found in rheumatoid arthritis (RA).

TABLE 1
List of all identified antigens

| | | Gene Symbol | | | | | | | | |
|---|---|---|---|---|---|---|---|---|---|---|
| | | and Exemplary | | | | | | | | |
| | Gene | Antigen | | T | T | T | T | T | T | T |
| ID | ID | Sequence | Gene Name | 2 | 3 | 4 | 5 | 6 | 7 | 8 |
| 1 | 23151 | GRAMD4 (SEQ | GRAM domain | | x | | x | | | |
| | | ID NO: 1) | containing 4 | | | | | | | |
| 2 | 51368 | TEX264 (SEQ | testis expressed | x | | x | | | x | x |
| | | ID NO: 2) | 264 | | | | | | | |
| 3 | 90993 | CREB3L1 (SEQ | cAMP responsive | x | | x | | x | | |
| | | ID NO: 3) | element binding | | | | | | | |
| | | | protein 3-like 1 | | | | | | | |
| 4 | 55421 | NCBP3; | nuclear cap binding | | | | | | x | |
| | | C17orf85 (SEQ | subunit 3 | | | | | | | |
| | | ID NO: 4) | | | | | | | | |
| 5 | 10818 | FRS2 (SEQ ID | fibroblast growth | | | x | x | x | | |
| | | NO: 5) | factor receptor | | | | | | | |
| | | | substrate 2 | | | | | | | |
| 6 | 6279 | S100A8 (SEQ ID | S100 calcium | | | x | | | x | x |
| | | NO: 6) | binding protein A8 | | | | | | | |
| 7 | 80342 | TRAF3IP3 (SEQ | TRAF3 interacting | | | | | | x | |
| | | ID NO: 7) | protein 3,- | | | | | | | |
| 8 | 4858 | NOVA2 (SEQ ID | neuro-oncological | x | | | | | x | |
| | | NO: 8) | ventral antigen 2 | | | | | | | |
| 9 | 84419 | C15orf48; | chromosome 15 open | x | x | | | | x | |
| | | NMES1 (SEQ ID | reading frame 48 | | | | | | | |
| | | NO: 9) | | | | | | | | |
| 10 | 4282 | MIF (SEQ ID | macrophage | x | x | | | | | x |
| | | NO: 10) | migration | | | | | | | |
| | | | inhibitory factor | | | | | | | |
| | | | (glycosylation- | | | | | | | |
| | | | inhibiting factor) | | | | | | | |
| 11 | 1485 | CTAG1B (SEQ ID | cancer/testis | x | x | | | | | |
| | | NO: 11) | antigen 1B | | | | | | | |
| 12 | 10486 | CAP2 (SEQ ID | CAP, adenylate | x | | x | | | | x |
| | | NO: 12) | cyclase-associated | | | | | | | |
| | | | protein, 2 (yeast) | | | | | | | |
| 13 | 1457 | CSNK2A1 (SEQ | casein kinase 2, | x | | | | | x | |
| | | ID NO: 13) | alpha 1 polypeptide | | | | | | | |
| 14 | 10644 | IGF2BP2 (SEQ | insulin-like growth | | x | | | | x | |
| | | ID NO: 14) | factor 2 mRNA | | | | | | | |
| | | | binding protein 2 | | | | | | | |
| 15 | 10243 | GPHN (SEQ ID | gephyrin | x | x | | x | | | |
| | | NO: 15) | | | | | | | | |
| 16 | 6386 | SDCBP (SEQ ID | syndecan binding | | | x | | x | | |
| | | NO: 16) | protein (syntenin) | | | | | | | |
| 17 | 3304 | HSPA1B (SEQ ID | heat shock 70 kDa | | | x | | | | x |
| | | NO: 17) | protein 1B | | | | | | | |
| 18 | 6710 | SPTB (SEQ ID | spectrin, beta, | | | x | | | | x |
| | | NO: 18) | erythrocytic | | | | | | | |
| 19 | 3280 | HES1 (SEQ ID | hes family bHLH | | | | | | x | |
| | | NO: 19) | transcription | | | | | | | |
| | | | factor 1 | | | | | | | |
| 20 | 4314 | MMP3 (SEQ ID | stromelysin 1 | | | | | | x | |
| | | NO: 20) | | | | | | | | |
| 21 | 64895 | PAPOLG (SEQ ID | poly(A) polymerase | | x | | x | | | |
| | | NO: 21) | gamma | | | | | | | |
| 22 | 6632 | SNRPD1 (SEQ ID | small nuclear | | | | | | x | |
| | | NO: 22) | ribonucleoprotein | | | | | | | |
| | | | D1 polypeptide | | | | | | | |
| 23 | 6741 | SSB (SEQ ID | Sjogren syndrome | | | | | | x | |
| | | NO: 23) | antigen B | | | | | | | |
| 24 | 7520 | XRCC5 (SEQ ID | X-ray repair cross | | | | | x | x | |
| | | NO: 24) | complementing 5 | | | | | | | |
| 25 | 2547 | XRCC6 (SEQ ID | X-ray repair cross | | | | | x | x | |
| | | NO: 25) | complementing 6 | | | | | | | |
| 26 | 8320 | EOMES (SEQ ID | eomesodermin | | | | | x | x | |
| | | NO: 26) | | | | | | | | |
| 27 | 2065 | ERBB3 (SEQ ID | erb-b2 receptor | x | | x | | | | x |
| | | NO: 27) | tyrosine kinase 3 | | | | | | | |
| 28 | 84971 | ATG4D (SEQ ID | autophagy related | | | x | | x | | |
| | | NO: 28) | 4D, cysteine | | | | | | | |
| | | | peptidase | | | | | | | |
| 29 | 63916 | ELMO2 (SEQ ID | engulfment and cell | | | | | x | | x |
| | | NO: 29) | motility 2 | | | | | | | |
| 30 | 11214 | AKAP13 (SEQ ID | A kinase (PRKA) | x | | | | | | |
| | | NO: 30) | anchor protein 13 | | | | | | | |
| 31 | 3306 | HSPA2 (SEQ ID | heat shock 70 kDa | | | x | | | | |
| | | NO: 31) | protein 2 | | | | | | | |
| 32 | 4093 | SMAD9 (SEQ ID | SMAD family member | | | x | | | | |
| | | NO: 32) | 9 | | | | | | | |
| 33 | 332 | BIRC5 (SEQ ID | baculoviral IAP | | | | x | | | |
| | | NO: 33) | repeat containing 5 | | | | | | | |
| 34 | 2243 | FGA (SEQ ID | fibrinogen alpha | | | | | | x | |
| | | NO: 34) | chain | | | | | | | |
| 35 | 10015 | PDCD6IP (SEQ | programmed cell | | | | | | | x |
| | | ID NO: 35) | death 6 interacting | | | | | | | |
| | | | protein | | | | | | | |
| 36 | 6195 | RPS6KA1 (SEQ | ribosomal protein | | | | x | | | |
| | | ID NO: 36) | S6 kinase, 90 kDa, | | | | | | | |
| | | | polypeptide 1 | | | | | | | |
| 37 | 79650 | USB1 (SEQ ID | U6 snRNA biogenesis | x | | | x | | | |
| | | NO: 37) | 1 | | | | | | | |
| 38 | 9275 | BCL7B (SEQ ID | B-cell CLL/lymphoma | | | | x | | | |
| | | NO: 38) | 7B | | | | | | | |
| 39 | 3646 | EIF3E (SEQ ID | eukaryotic | | | | x | | | |
| | | NO: 39) | translation | | | | | | | |
| | | | initiation factor | | | | | | | |
| | | | 3, subunit E | | | | | | | |
| 40 | 64946 | CENPH (SEQ ID | centromere protein | x | | | x | | | |
| | | NO: 40) | H | | | | | | | |
| 41 | 55970 | GNG12 (SEQ ID | guanine nucleotide | | | | x | | | |
| | | NO: 41) | binding protein (G | | | | | | | |
| | | | protein), gamma 12 | | | | | | | |
| 42 | 79714 | CCDC51 (SEQ ID | coiled-coil domain | | | | x | | | |
| | | NO: 42) | containing 51 | | | | | | | |
| 43 | 3364 | HUS1 (SEQ ID | HUS1 checkpoint | | | | x | | | |
| | | NO: 43) | homolog (S. pombe) | | | | | | | |
| 44 | 3315 | HSPB1 (SEQ ID | heat shock 27 kDa | | | | | | | x |
| | | NO: 44) | protein 1 | | | | | | | |
| 45 | 3818 | KLKB1 (SEQ ID | kallikrein B, | | | | | | | x |
| | | NO: 45) | plasma (Fletcher | | | | | | | |
| | | | factor) 1 | | | | | | | |
| 46 | 23367 | LARP1 (SEQ ID | La | | | | | | | x |
| | | NO: 46) | ribonucleoprotein | | | | | | | |
| | | | domain family, | | | | | | | |
| | | | member 1 | | | | | | | |
| 47 | 3959 | LGALS3BP (SEQ | lectin, | | | | | | | x |
| | | ID NO: 47) | galactoside- | | | | | | | |
| | | | binding, soluble, 3 | | | | | | | |
| | | | binding protein | | | | | | | |
| 48 | 8473 | OGT (SEQ ID | O-linked N- | | | | | | | x |
| | | NO: 48) | acetylglucosamine | | | | | | | |
| | | | (GlcNAc) | | | | | | | |
| | | | transferase | | | | | | | |
| 49 | 5175 | PECAM1 (SEQ ID | platelet/endothelia | | | | | | | x |
| | | NO: 49) | 1 cell adhesion | | | | | | | |
| | | | molecule 1 | | | | | | | |
| 50 | 8204 | NRIP1 (SEQ ID | nuclear receptor | x | | | | | x | |
| | | NO: 50) | interacting protein | | | | | | | |
| | | | 1 | | | | | | | |
| 51 | 5504 | PPP1R2 (SEQ ID | protein phosphatase | | | | | | x | |
| | | NO: 51) | 1, regulatory | | | | | | | |
| | | | (inhibitor) subunit | | | | | | | |
| | | | 2 | | | | | | | |
| 52 | 26525 | IL36RN (SEQ ID | interleukin 36 | | | | | | x | |
| | | NO: 52) | receptor antagonist | | | | | | | |
| 53 | 22913 | RALY (SEQ ID | RALY heterogeneous | | | | | | x | |
| | | NO: 53) | nuclear | | | | | | | |
| | | | ribonucleoprotein | | | | | | | |
| 54 | 57402 | S100A14 (SEQ | S100 calcium | | | | | | x | |
| | | ID NO: 54) | binding protein A14 | | | | | | | |
| 55 | 6625 | SNRNP70 (SEQ | small nuclear | | | | | | x | |
| | | ID NO: 55) | ribonucleoprotein | | | | | | | |
| | | | U1 subunit 70 | | | | | | | |
| 56 | 6626 | SNRPA (SEQ ID | small nuclear | x | | | | | x | |
| | | NO: 56) | ribonucleoprotein | | | | | | | |
| | | | polypeptide A | | | | | | | |
| 57 | 10071 | MUC12 (SEQ ID | mucin 12, cell | | | x | | | | |
| | | NO: 57) | surface associated | | | | | | | |
| 58 | 8337 | HIST2H2AA3 | histone cluster 2, | | | x | | | | |
| | | (SEQ ID NO: 58) | H2aa3 | | | | | | | |
| 59 | 10572 | SIVA1 (SEQ ID | SIVA1, apoptosis- | | x | | | | | |
| | | NO: 59) | inducing factor | | | | | | | |
| 60 | 361 | AQP4 (SEQ ID | aquaporin 4 | x | x | | | | | |
| | | NO: 60) | | | | | | | | |
| 61 | 6181 | RPLP2 (SEQ ID | ribosomal protein, | x | | | | | | |
| | | NO: 61) | large, P2 | | | | | | | |
| 62 | 6382 | SDC1 (SEQ ID | syndecan 1 | x | | | | | | |
| | | NO: 62) | | | | | | | | |
| 63 | 6434 | TRA2B_cit (SEQ | transformer 2 beta | x | | | | | | |
| | | ID NO: 63) | homolog | | | | | | | |
| | | | (Drosophila) | | | | | | | |
| 64 | 112398 | EGLN2 (SEQ ID | egl-9 family | | | | | | | x |
| | | NO: 64) | hypoxia-inducible | | | | | | | |
| | | | factor 2 | | | | | | | |
| 65 | 10411 | RAPGEF3 (SEQ | Rap guanine | | | | | | | x |
| | | ID NO: 65) | nucleotide exchange | | | | | | | |
| | | | factor (GEF) 3 | | | | | | | |
| 66 | 56475 | RPRM (SEQ ID | reprimo, TP53 | | | | | | | x |
| | | NO: 66) | dependent G2 arrest | | | | | | | |
| | | | mediator candidate | | | | | | | |
| 67 | 54904 | NSD3; | nuclear receptor | | | | | | | x |
| | | WHSC1L1 (SEQ | binding SET domain | | | | | | | |
| | | ID NO: 67) | protein 3 | | | | | | | |
| 68 | 23400 | ATP13A2 (SEQ | ATPase type 13A2 | | | | | | | x |
| | | ID NO: 68) | | | | | | | | |
| 69 | 1521 | CTSW (SEQ ID | cathepsin W | | | | | | | x |
| | | NO: 69) | | | | | | | | |
| 70 | 30827 | CXXC1 (SEQ ID | CXXC finger protein | | | | | | | x |
| | | NO: 70) | 1 | | | | | | | |
| 71 | 8772 | FADD (SEQ ID | Fas (TNFRSF6)- | | | | | | | x |
| | | NO: 71) | associated via | | | | | | | |
| | | | death domain | | | | | | | |
| 72 | 60 | ACTB (SEQ ID | actin, beta | x | | | | | x | |
| | | NO: 72) | | | | | | | | |
| 73 | 4302 | MLLT6 (SEQ ID | myeloid/lymphoid or | x | | | | | x | |
| | | NO: 73) | mixed-lineage | | | | | | | |
| | | | leukemia | | | | | | | |
| 74 | 408 | ARRB1 (SEQ ID | arrestin, beta 1 | x | | | | | x | |
| | | NO: 74) | | | | | | | | |
| 75 | 1048 | CEACAM5 (SEQ | carcinoembryonic | | | | | | x | |
| | | ID NO: 75) | antigen-related | | | | | | | |
| | | | cell adhesion | | | | | | | |
| | | | molecule 5 | | | | | | | |
| 76 | 2931 | GSK3A (SEQ ID | glycogen synthase | | | | | | x | |
| | | NO: 76) | kinase 3 alpha | | | | | | | |
| 77 | 3065 | HDAC1 (SEQ ID | histone deacetylase | | | | | | x | |
| | | NO: 77) | 1 | | | | | | | |
| 78 | 3915 | LAMC1 (SEQ ID | laminin, gamma 1 | x | | | | | x | |
| | | NO: 78) | | | | | | | | |
| 79 | 4436 | MSH2 (SEQ ID | mutS homolog 2 | | | | | | x | |
| | | NO: 79) | | | | | | | | |
| 80 | 4150 | MAZ (SEQ ID | NYC-associated zinc | | | | | | x | |
| | | NO: 80) | finger protein | | | | | | | |
| | | | (purine-binding | | | | | | | |
| | | | transcription | | | | | | | |
| | | | factor) | | | | | | | |
| 81 | 5801 | PTPRR (SEQ ID | protein tyrosine | | | | | | x | |
| | | NO: 81) | phosphatase, | | | | | | | |
| | | | receptor type, R | | | | | | | |
| 82 | 1676 | DFFA (SEQ ID | DNA fragmentation | | | | | | x | |
| | | NO: 82) | factor, 45 kDa, | | | | | | | |
| | | | alpha polypeptide | | | | | | | |
| 83 | 1719 | DHFR (SEQ ID | dihydrofolate | | | | | | x | |
| | | NO: 83) | reductase | | | | | | | |
| 84 | 2316 | FLNA (SEQ ID | filamin A, alpha | | | | | | x | |
| | | NO: 84) | | | | | | | | |
| 85 | 891 | CCNB1 (SEQ ID | cyclin B1 | | | | | | x | |
| | | NO: 85) | | | | | | | | |
| 86 | 6464 | SHC1 (SEQ ID | SHC (Src homology 2 | x | | | | | x | |
| | | NO: 86) | domain containing) | | | | | | | |
| | | | transforming | | | | | | | |
| | | | protein 1 | | | | | | | |
| 87 | 811 | CALR (SEQ ID | calreticulin | | | | | | x | |
| | | NO: 87) | | | | | | | | |
| 88 | 2870 | GRK6 (SEQ ID | G protein-coupled | x | x | | | | | |
| | | NO: 88) | receptor kinase 6 | | | | | | | |
| 89 | 2771 | GNAI2 (SEQ ID | G protein subunit | | | | | | x | |
| | | NO: 89) | alpha i2 | | | | | | | |
| 90 | 2260 | FGFR1 (SEQ ID | fibroblast growth | | x | | | | | |
| | | NO: 90) | factor receptor 1 | | | | | | | |
| 91 | 201161 | CENPV (SEQ ID | centromere protein | | | | | | x | |
| | | NO: 91) | V | | | | | | | |
| 92 | 22994 | CEP131 (SEQ ID | centrosomal protein | | | | | | x | |
| | | NO: 92) | 131 kDa | | | | | | | |
| 93 | 4659 | PPP1R12A (SEQ | protein phosphatase | | | x | | | | |
| | | ID NO: 93) | 1, regulatory | | | | | | | |
| | | | subunit 12A | | | | | | | |
| 94 | 843 | CASP10 (SEQ ID | caspase 10 | | | x | | | | |
| | | NO: 94) | | | | | | | | |
| 95 | 2308 | FOXO1 (SEQ ID | forkhead box O1 | | | x | | | | |
| | | NO: 95) | | | | | | | | |
| 96 | 29894 | CPSF1 (SEQ ID | cleavage and | x | | | | | | |
| | | NO: 96) | polyadenylation | | | | | | | |
| | | | specific factor 1, | | | | | | | |
| | | | 160 kDa | | | | | | | |
| 97 | 156 | GRK2 (SEQ ID | G protein-coupled | x | | | | | | |
| | | NO: 97) | receptor kinase 2 | | | | | | | |
| 98 | 10000 | AKT3 (SEQ ID | v-akt murine | x | | | | | | |
| | | NO: 98) | thymoma viral | | | | | | | |
| | | | oncogene homolog 3 | | | | | | | |
| 99 | 307 | ANXA4 (SEQ ID | annexin A4 | x | | | | | | |
| | | NO: 99) | | | | | | | | |
| 100 | 483 | ATP1B3 (SEQ ID | ATPase, Na+/K+ | x | | | | | | |
| | | NO: 100) | transporting, beta | | | | | | | |
| | | | 3 polypeptide | | | | | | | |
| 101 | 613 | BCR (SEQ ID | breakpoint cluster | x | | | | | | |
| | | NO: 101) | region | | | | | | | |
| 102 | 30850 | CDR2L (SEQ ID | cerebellar | x | | | | | | |
| | | NO: 102) | degeneration- | | | | | | | |
| | | | related protein 2- | | | | | | | |
| | | | like | | | | | | | |
| 103 | 4830 | NME1 (SEQ ID | NME/NM23 nucleoside | x | | | | | | |
| | | NO: 103) | diphosphate kinase | | | | | | | |
| | | | 1 | | | | | | | |
| 104 | 10563 | CXCL13 (SEQ ID | chemokine (C-X-C | x | | | | | | |
| | | NO: 104) | motif) ligand 13 | | | | | | | |
| 105 | 6374 | CXCL5 (SEQ ID | chemokine (C-X-C | x | | | | | | |
| | | NO: 105) | motif) ligand 5 | | | | | | | |
| 106 | 22826 | DNAJC8 (SEQ ID | DnaJ (Hsp40) | x | | | | | | |
| | | NO: 106) | homolog, subfamily | | | | | | | |
| | | | C, member 8 | | | | | | | |
| 107 | 1845 | DUSP3 (SEQ ID | dual specificity | x | | | | | | |
| | | NO: 107) | phosphatase 3 | | | | | | | |
| 108 | 1938 | EEF2 (SEQ ID | eukaryotic | x | | | | | | |
| | | NO: 108) | translation | | | | | | | |
| | | | elongation factor 2 | | | | | | | |
| 109 | 9500 | MAGED1 (SEQ ID | melanoma antigen | x | | | | | | |
| | | NO: 109) | family D, 1 | | | | | | | |
| 110 | 9470 | EIF4E2 (SEQ ID | eukaryotic | | | | | x | | |
| | | NO: 110) | translation | | | | | | | |
| | | | initiation factor | | | | | | | |
| | | | 4E family member 2 | | | | | | | |
| 111 | 3329 | HSPD1 (SEQ ID | heat shock protein | | | | | x | | |
| | | NO: 111) | family D (Hsp60) | | | | | | | |
| | | | member 1 | | | | | | | |
| 112 | 3605 | IL17A (SEQ ID | interleukin 17A | | | | | x | | |
| | | NO: 112) | | | | | | | | |
| 113 | 4137 | MAPT (SEQ ID | microtubule- | | | | | x | | |
| | | NO: 113) | associated protein | | | | | | | |
| | | | tau | | | | | | | |
| 114 | 55703 | POLR3B (SEQ ID | polymerase (RNA) | | | | | x | | |
| | | NO: 114) | III (DNA directed) | | | | | | | |
| | | | polypeptide B | | | | | | | |
| 115 | 26037 | SIPA1L1 (SEQ | signal-induced | x | | | | x | | |
| | | ID NO: 115) | proliferation- | | | | | | | |
| | | | associated 1 like 1 | | | | | | | |
| 116 | 6613 | SUMO2 (SEQ ID | small ubiquitin- | | | | | x | | |
| | | NO: 116) | like modifier 2 | | | | | | | |
| 117 | 9325 | TRIP4 (SEQ ID | thyroid hormone | | | | | x | | |
| | | NO: 117) | receptor interactor | | | | | | | |
| | | | 4 | | | | | | | |
| 118 | 51271 | UBAP1 (SEQ ID | ubiquitin | x | | | | x | | |
| | | NO: 118) | associated protein | | | | | | | |
| | | | 1 | | | | | | | |
| 119 | 8945 | BTRC (SEQ ID | beta-transducin | x | | | | | | x |
| | | NO: 119) | repeat containing | | | | | | | |
| | | | E3 ubiquitin | | | | | | | |
| | | | protein ligase | | | | | | | |
| 120 | 1956 | EGFR (SEQ ID | epidermal growth | | | | | | | x |
| | | NO: 120) | factor receptor | | | | | | | |
| 121 | 2335 | FN1 (SEQ ID | fibronectin 1 | | | | | | | x |
| | | NO: 121) | | | | | | | | |
| 122 | 3855 | KRT7 (SEQ ID | keratin 7, type II | | | | | | | x |
| | | NO: 122) | | | | | | | | |
| 123 | 3913 | LAMB2 (SEQ ID | laminin, beta 2 | | | | | | | x |
| | | NO: 123) | (laminin S) | | | | | | | |
| 124 | 4286 | MITF (SEQ ID | microphthalmia- | | | | | | | x |
| | | NO: 124) | associated | | | | | | | |
| | | | transcription | | | | | | | |
| | | | factor | | | | | | | |
| 125 | 5493 | PPL (SEQ ID | periplakin | | | | | | | x |
| | | NO: 125) | | | | | | | | |
| 126 | 59307 | SIGIRR (SEQ ID | single | x | | | | | | x |
| | | NO: 126) | immunoglobulin and | | | | | | | |
| | | | toll-interleukin 1 | | | | | | | |
| | | | receptor (TIR) | | | | | | | |
| | | | domain | | | | | | | |
| 127 | 53340 | SPA17 (SEQ ID | sperm autoantigenic | | | | | | | x |
| | | NO: 127) | protein 17 | | | | | | | |
| 128 | 51684 | SUFU (SEQ ID | suppressor of fused | x | | | | | | x |
| | | NO: 128) | homolog | | | | | | | |
| | | | (Drosophila) | | | | | | | |
| 129 | 54472 | TOLLIP (SEQ ID | toll interacting | | | | | | | x |
| | | NO: 129) | protein | | | | | | | |
| 130 | 4796 | TONSL (SEQ ID | tonsoku-like, DNA | | | | | | | x |
| | | NO: 130) | repair protein | | | | | | | |
| 131 | 123 | PLIN2 (SEQ ID | perilipin 2 | x | | | | x | | |
| | | NO: 131) | | | | | | | | |
| 132 | 64326 | RFWD2 (SEQ ID | ring finger and WD | | | | | x | | |
| | | NO: 132) | repeat domain 2, E3 | | | | | | | |
| | | | ubiquitin protein | | | | | | | |
| | | | ligase | | | | | | | |
| 133 | 11194 | ABCB8 (SEQ ID | ATP-binding | x | | | | x | | |
| | | NO: 133) | cassette, sub- | | | | | | | |
| | | | family B (MDR/TAP), | | | | | | | |
| | | | member 8 | | | | | | | |
| 134 | 8878 | SQSTM1 (SEQ ID | sequestosome 1 | | | | | x | | |
| | | NO: 134) | | | | | | | | |
| 135 | 30848 | CTAG2 (SEQ ID | cancer/testis | x | | | | | | |
| | | NO: 135) | antigen 2 | | | | | | | |

[0148] The GeneID and Gene Symbol can be found on the NCBI website available at www.ncbi.hlm.nih.gov. More information about the gene can be found by accessing the NCBI website and entering the GeneID or Gene Symbol, for instance.

### Example 8: Identification of the Pre-Treatment Autoantibody Response in Melanoma Patients

[0149] The pre-treatment (T0 or baseline) autoantibody response of melanoma patients has the potential to predict clinical response or longer survival of melanoma patients. Serum samples from 193 melanoma patients were obtained before starting treatment with anti-CTLA-4 (ipilumumab), anti-PD-1 (nivolumab or pembrolizumab) or anti-CTLA-4/anti-PD-1 combination therapy. The autoantibody levels of serum samples from melanoma patients were compared with autoantibody profiles of 148 healthy volunteer samples using based statistical technique Significance of microarrays (SAM).

[0150] The preexisting autoantibody repertoire of melanoma patients at baseline is shown in Table 2. Autoantibody targets in table 2 are top-down ranked by their calculated SAM Score d. The correlation of baseline autoantibodies with different clinical endpoints such as the occurrence of irAEs or clinical response (disease control rate, DCR) is shown in separate tables (T).

[0151] Table 2 shows 36 autoantibody targets with higher reactivity in the melanoma group compared healthy controls, which is indicated by a positive fold change: RPLP2, CTAG1B, EEF2, CXCL5, DNAJC8, CREB3L1, AKT3, CXCL13, NME1, ANXA4, AKAP13, CDR2L, ATP1B3, DUSP3, SDC1, CPSF1, GRK2, TRA2B, BCR, CSNK2A1, ARRB1, GRK6, CTAG2, MIF, ERBB3, SUFU, BTRC, SIGIRR, SIPA1L1, ACTB, MLLT6, SHC1, CAP2, GPHN, AQP4, and NOVA2.

[0152] There were also 11 autoantibodies with lower reactivity (negative fold-change) in the melanoma group compared to healthy control samples: SNRPA, NRIP1, UBAP1, TEX264, PLIN2, LAMC1, CENPH, USB1, ABCB8, C15orf48/NMES1, and MAGED1.

[0153] FIG. 5 shows Box-and-Whisker plots and ROC curves of three autoantibodies, CREB3L1, CXCL5, and NME1, with higher reactivity in serum samples of melanoma patients compared to healthy controls. The calculated area under the curve (AUC) of CREB3L1, CXCL5, and NME1 is 69%, 72%, and 69%, respectively.

[0154] CREB3L1 is also referred to as “Cyclic AMP-responsive element-binding protein 3-like protein 1”, “Old astrocyte specifically-induced substance”, and OASIS. CREB3L1 is a transcription factor that represses expression of genes regulating metastasis, invasion, and angiogenesis. Baseline anti-CREB3L1 antibodies also predict the development of irAE following treatment with different checkpoint inhibitors (Table 4) including ipilimumab (Table 6).

[0155] CXCL5 is also referred to as “C-X-C motif chemokine 5”, “Epithelial-derived neutrophil-activating protein 78”, “Neutrophil-activating peptide ENA-78”, “Small-inducible cytokine B5”, and ENA78. CXCL5 is a chemokine, which stimulates the chemotaxis of neutrophils possessing angiogenic properties following binding the binds to cell surface chemokine receptor CXCR2. Tumor-associated neutrophils are increasingly recognized for their ability to promote tumor progression, mediate resistance to therapy, and regulate immunosuppression via the CXCL5/CXCR2 axis.

[0156] NME1 is also referred to as “Nucleoside diphosphate kinase A (EC:2.7.4.6)”, “NDP kinase A”, “Granzyme A-activated DNase”, “Metastasis inhibition factor nm23”, “Tumor metastatic process-associated protein”, GAAD, NM23-H1, NME1, NDPKA, and. NM23. Expression of the metastasis suppressor NME1 in melanoma is associated with reduced cellular motility and invasion in vitro and metastasis.

[0157] The three examples demonstrate that the autoantibody response of tumor patients is directed against a diverse set of proteins, which play a role in cancer processes.

TABLE 2
Autoantibody profile of melanoma patients

| | | | SAM | SAM | | | | | | |
|---|---|---|---|---|---|---|---|---|---|---|
| | | | Score d HC | fold-change | | | | | | |
| Marker No | Gene ID | Gene Symbol | vs Melanoma | HC vs Melanoma | T3 | T4 | T5 | T6 | T7 | T8 |
| 61 | 6181 | RPLP2 | 6.59 | 3.08 | x | | | | | |
| 11 | 1485 | CTAG1B | 5.70 | 3.70 | x | x | | | | |
| 108 | 1938 | EEF2 | 5.40 | 2.51 | x | | | | | |
| 105 | 6374 | CXCL5 | 5.40 | 2.45 | x | | | | | |
| 106 | 22826 | DNAJC8 | 5.04 | 2.26 | x | | | | | |
| 3 | 90993 | CREB3L1 | 4.94 | 2.90 | x | | x | | x | |
| 98 | 10000 | AKT3 | 4.86 | 1.77 | x | | | | | |
| 104 | 10563 | CXCL13 | 4.86 | 1.88 | x | | | | | |
| 103 | 4830 | NME1 | 4.73 | 1.98 | x | | | | | |
| 99 | 307 | ANXA4 | 4.53 | 1.73 | x | | | | | |
| 30 | 11214 | AKAP13 | 4.50 | 1.96 | x | | | | | |
| 102 | 30850 | CDR2L | 4.48 | 2.19 | x | | | | | |
| 100 | 483 | ATP1B3 | 4.46 | 1.71 | x | | | | | |
| 107 | 1845 | DUSP3 | 4.38 | 1.92 | x | | | | | |
| 62 | 6382 | SDC1 | 4.10 | 1.47 | x | | | | | |
| 96 | 29894 | CPSF1 | 4.09 | 1.83 | x | | | | | |
| 97 | 156 | GRK2 | 4.04 | 2.17 | x | | | | | |
| 63 | 6434 | TRA2B | 4.04 | 1.36 | x | | | | | |
| 101 | 613 | BCR | 4.01 | 1.57 | x | | | | | |
| 13 | 1457 | CSNK2A1 | 4.01 | 1.87 | x | | | | | x |
| 74 | 408 | ARRB1 | 3.91 | 1.80 | x | | | | | x |
| 88 | 2870 | GRK6 | 3.68 | 1.43 | x | x | | | | |
| 135 | 30848 | CTAG2 | 3.54 | 2.04 | x | | | | | |
| 10 | 4282 | MIF | 2.08 | 1.26 | x | x | | | | |
| 27 | 2065 | ERBB3 | 1.95 | 1.23 | x | | x | | | |
| 128 | 51684 | SUFU | 1.92 | 1.27 | x | | | | | |
| 119 | 8945 | BTRC | 1.90 | 1.33 | x | | | | | |
| 126 | 59307 | SIGIRR | 1.87 | 1.39 | x | | | | | |
| 115 | 26037 | SIPA1L1 | 1.83 | 1.34 | x | | | | x | |
| 72 | 60 | ACTB | 1.75 | 1.31 | x | | | | | x |
| 73 | 4302 | MLLT6 | 1.75 | 1.31 | x | | | | | x |
| 86 | 6464 | SHC1 | 1.70 | 1.20 | x | | | | | x |
| 12 | 10486 | CAP2 | 1.64 | 1.23 | x | | x | | | |
| 15 | 10243 | GPHN | 1.63 | 1.19 | x | x | | x | | |
| 60 | 361 | AQP4 | 1.62 | 1.24 | x | x | | | | |
| 8 | 4858 | NOVA2 | 1.52 | 1.42 | x | | | | | x |
| 56 | 6626 | SNRPA | −1.66 | 0.75 | x | | | | | x |
| 50 | 8204 | NRIP1 | −1.89 | 0.72 | x | | | | | x |
| 118 | 51271 | UBAP1 | −1.90 | 0.72 | x | | | | x | |
| 2 | 51368 | TEX264 | −2.19 | 0.65 | x | | x | | | x |
| 131 | 123 | PLIN2 | −2.20 | 0.65 | x | | | | x | |
| 78 | 3915 | LAMC1 | −2.25 | 0.64 | x | | | | | x |
| 40 | 64946 | CENPH | −2.25 | 0.70 | x | | | x | | |
| 37 | 79650 | USB1 | −2.56 | 0.73 | x | | | x | | |
| 133 | 11194 | ABCB8 | −2.61 | 0.77 | x | | | | x | |
| 9 | 84419 | C15orf48; NMES1 | −2.66 | 0.74 | x | x | | | | x |
| 109 | 9500 | MAGED1 | −4.28 | 0.65 | x | | | | | |

### Example 9: Identification of Autoantibodies Associated or Predicting Survival and Clinical Response to Immune-Oncology Agents

[0158] The role of B cells and their secreted products in driving anti-cancer immunity is only insufficiently understood. Autoantibodies produced by B cells may have both pro- and anti-tumor effects. Thus, autoantibodies may serve as biomarkers of the general immune fitness of a cancer patients and his ability to respond to immune-oncology agents.

[0159] The autoantibody reactivity of serum samples from 193 melanoma patients treated with anti-CTLA-4 (ipilumumab), anti-PD-1 (nivolumab or pembrolizumab) or anti-CTLA-4/anti-PD-1 combination therapy was analyzed. To evaluate the difference in autoantibody levels between the clinical outcomes DCR and PD, the statistical test SAM was applied. Spearman's rank correlation analysis was used to evaluate the association between autoantibody levels and overall survival (OS).

[0160] Ten autoantibodies predicted a clinical response referred to as “disease control rate” (DCR) to immune-oncology treatments in general.

[0161] Six baseline autoantibodies directed towards SIVA1, IGF2BP2, AQP4, C15orf48, GPHN, and CTAG1B appear to be predictors of DCR.

[0162] Four baseline autoantibodies directed towards GRK6, FGFR1, MIF, and GRAMD4 appear to be predictors of non-response or progressive disease (PD) to immune-oncology treatment in general.

[0163] Anti-PAPOLG antibodies were weakly associated with overall survival (Spearman's rank correlation coefficient r=0.32).

[0164] Table 3 shows autoantibodies associated with OS and DCR in melanoma patients treated with different checkpoint inhibitors.

TABLE 3
Autoantibodies associated OS and DCR in melanoma patients

| | | | | SAM | SAM |
|---|---|---|---|---|---|
| | Gene | Gene | Spearman's | Score d | fold-change |
| ID | ID | Symbol | R-value OS | DCR at T0 | DCR at T0 |
| 59 | 10572 | SIVA1 | 0.02 | 2.12 | 1.66 |
| 14 | 10644 | IGF2BP2 | 0.07 | 1.99 | 1.65 |
| 60 | 361 | AQP4 | −0.15 | 1.85 | 1.49 |
| 9 | 84419 | C15orf48 | 0.11 | 1.85 | 1.46 |
| 15 | 10243 | GPHN | 0.09 | 1.84 | 1.40 |
| 11 | 1485 | CTAG1B | 0.08 | 1.83 | 2.21 |
| 21 | 64895 | PAPOLG | 0.32 | 0.24 | 1.05 |
| 88 | 2870 | GRK6 | −0.12 | −1.80 | 0.71 |
| 90 | 2260 | FGFR1 | −0.07 | −1.86 | 0.67 |
| 10 | 4282 | MIF | −0.07 | −1.88 | 0.67 |
| 1 | 23151 | GRAMD4 | −0.18 | −1.92 | 0.68 |

[0165] FIG. 6 shows four baseline autoantibodies, SIVA1, IGF2BP2, AQP4, and C15orf48, which predict DCR and two baseline autoantibodies, MIF and GRAMD4, which predict PD to checkpoint inhibitor treatment in general.

[0166] SIVA1 is also referred to as “Apoptosis regulatory protein Siva”, “CD27-binding protein”, CD27BP, or SIVA1. SIVA1 plays an important role in the apoptotic (programmed cell death) pathway induced by the CD27 antigen, a member of the tumor necrosis factor receptor (TFNR) superfamily.

[0167] IGF2BP2 is also referred to as “Insulin-like growth factor 2 mRNA-binding protein 2”, “Hepatocellular carcinoma autoantigen p62”, “IGF-II mRNA-binding protein 2”, “VICKZ family member 2”, IGF2BP2, IMP2, or VICKZ2. The gene encoding IGF2BP2 is amplified and overexpressed in many human cancers, accompanied by a poorer prognosis (Dai et al., 2017). Higher baseline anti-IGF2BP2 antibodies were also found in melanoma patients who achieve DCR following treatment with the PD-1/PD-L1 pathway blocker pembrolizumab.

[0168] AQP4 is also referred to as “Aquaporin-4”, “Mercurial-insensitive water channel”, MIWC, or WCH4. AQP4 is a water channel protein, predominantly found in tissues of neuronal origin. Anti-AQP4 antibodies are found in the autoimmune disorder, neuromyelitis optica, NMO, which affects the optics nerves and spinal cord of individuals. Higher levels of anti-AQP4 antibodies were found in melanoma patients compared to healthy controls.

[0169] C15orf48 is also referred to as “normal mucosa of esophagus-specific gene 1 protein”, Protein FOAP-11, MIR147BHG, or NMES1. Higher baseline anti-IGF2BP2 antibodies were also found were found in melanoma patients compared to healthy controls and predict clinical response as defined as DCR following treatment with the PD-1/PD-L1 pathway blocker pembrolizumab.

[0170] GRAMD4 is also referred to as “GRAM domain-containing protein 4”, “Death-inducing protein”, DIP, or KIAA0767. GRAMD4 has been reported as a pro-apoptotic protein. Higher baseline levels of anti-GRAMD4 antibodies were also associated with PD and shorter overall survival in melanoma patients treated with the CTLA-4 inhibitor ipilimumab.

[0171] MIF is also referred to as “Macrophage migration inhibitory factor (EC:5.3.2.1)”, “Glycosylation-inhibiting factor”, “L-dopachrome tautomerase (EC:5.3.3.12)”, or GIF. MIF is a proinflammatory cytokine, which is overexpressed in malignant melanoma. Higher baseline levels of anti-MIF antibodies were found in melanoma patients compared to healthy controls and in melanoma patients who do not develop irAEs after treatment with the PD-1/PD-L1 pathway blocker pembrolizumab.

### Example 10: Identification of Baseline Autoantibodies Predicting irAE in Melanoma Patients Following Treatment with Different Checkpoint Inhibitors

[0172] Despite important clinical benefits, checkpoint inhibitors area associated with immune-related adverse events (irAEs) The mechanisms by which checkpoint inhibitors induce irAEs are not completely understood. It is believed that by blocking negative checkpoints a general immunologic enhancement occurs. It is also possible that by unleashing the immune-checkpoints that control tolerance, autoreactive lymphocytes are activated, which could be either T cells or B cells. It is well known that in autoimmune diseases autoreactive B cells produce autoantibodies that can induce tissue damage via ADCC. Thus, epitope spreading towards self-antigens may be an indicator for irAEs.

[0173] Autoantibodies predicting irAEs were identified in pre-treatment samples from patients receiving different checkpoint inhibitors such as anti-CTLA-4, anti-PD-1 or combination therapies of anti-CTLA-4 and anti-PD-1. To evaluate the difference in autoantibody levels between patients experiencing an irAE and those who do not, the statistical test SAM was applied.

[0174] Table 4 includes 12 autoantibodies reacting with TEX264, CREB3L1, HSPA1B, SPTB, MUC12, ERBB3, ATG4D, CASP10, FOXO1, FRS2, and PPP1R12A, which appear to predict irAEs in baseline samples. A positive fold-change indicates higher autoantibody levels in the group of melanoma patients who experience an irAE, whereas a negative fold-change indicates higher autoantibody levels in patients who do not develop an irAE. Table 4 includes five autoantibodies, HSPA2, SMAD9, HIST2H2AA3, S100A8, and SDCBP, which predict that patients having higher autoantibody levels do not develop an irAE.

TABLE 4
Baseline autoantibodies predicting irAE in melanoma patients
following treatment with different checkpoint inhibitors

| | | | SAM | SAM |
|---|---|---|---|---|
| | Gene | Gene | Score.d.irAE | Fold.Change |
| ID | ID | Symbol | at T0 | irAE at T0 |
| 2 | 51368 | TEX264 | 2.41 | 1.93 |
| 3 | 90993 | CREB3L1 | 2.33 | 2.42 |
| 17 | 3304 | HSPA1B | 2.17 | 1.63 |
| 18 | 6710 | SPTB | 2.17 | 1.63 |
| 57 | 10071 | MUC12 | 2.06 | 1.49 |
| 27 | 2065 | ERBB3 | 2.04 | 1.36 |
| 28 | 84971 | ATG4D | 2.03 | 1.36 |
| 94 | 843 | CASP10 | 2.02 | 1.36 |
| 95 | 2308 | FOXO1 | 1.99 | 1.83 |
| 5 | 10818 | FRS2 | 1.92 | 1.72 |
| 93 | 4659 | PPP1R12A | 1.90 | 1.59 |
| 12 | 10486 | CAP2 | 1.87 | 1.43 |
| 31 | 3306 | HSPA2 | −1.85 | 0.72 |
| 32 | 4093 | SMAD9 | −1.96 | 0.71 |
| 58 | 8337 | HIST2H2AA3 | −2.04 | 0.73 |
| 6 | 6279 | S100A8 | −2.15 | 0.76 |
| 16 | 6386 | SDCBP | −2.73 | 0.60 |

[0175] FIG. 7 shows Box-and-Whisker Plots and ROC curves of baseline levels of anti-TEX264 and anti-SDCBP antibodies that allow to discriminate patients developing irAE from those who do not develop irAE in response to checkpoint inhibitor treatment. The calculated area under the curve (AUC) of anti-TEX264 and anti-SDCBP is 60% and 69%, respectively.

[0176] TEX264 is also referred to as “Testis-expressed protein 264”, or “Putative secreted protein Zsig11”. The function of the gene encoding TEX264 is currently unknown. Elevated baseline anti-TEX264 antibodies also predict clinical response as defined as DCR and the development of irAEs in patients treated with the anti-PD-1 blocker pembrolizumab.

[0177] SDCBP is also referred to as “syntenin-1”, “Melanoma differentiation-associated protein 9”, MDA-9, “Pro-TGF-alpha cytoplasmic domain-interacting protein 18”, TACIP18, “Scaffold protein Pbp1”, “Syndecan-binding protein 1”, MDA9, or SYCL. SDCBP is expressed in melanoma and influences metastasis by regulating both tumor cells and the microenvironment (Das et al., 2012). Higher baseline anti-SDCBP antibodies were also found in patients who do not develop irAEs following treatment with anti-CTLA-4 inhibitor ipilimumab.

### Example 11: Identification of Autoantibodies Associated or Predicting Survival and Clinical Response to Ipilimumab Treatment

[0178] One of the reasons to terminate a patient's cancer therapy or to change the therapy is disease progression.

[0179] To identify autoantibodies that allow to identify patients who benefit from ipilimumab therapy, serum samples from 82 melanoma patients treated with ipilimumab were analyzed.

[0180] Biomarkers correlating with progression-free survival (PFS) or overall survival (OS) were calculated using Spearman's correlation. To evaluate the difference in autoantibody levels between the clinical outcomes DCR and PD, the statistical test SAM was applied.

[0181] Table 5 shows 13 autoantibodies, FRS2, GPHN, BIRC5, EIF3E, CENPH, PAPOLG, HUS1, GNG12, CCDC51, USB1, GRAMD4, RPS6KA1, and BCL7B, correlating positively or negatively with PFS, OS, or predict DCR or PD in baseline samples.

[0182] FIG. 8 shows Box-and-Whisker plots of six baseline autoantibodies, FRS2, GPHN, BIRC5, GRAMD4, RPS6Ka2, and BCL7B, predicting DCR or PD to ipilimumab.

[0183] BIRC5 is also known as “Baculoviral IAP repeat-containing protein 5”, “Apoptosis inhibitor 4”, “Apoptosis inhibitor surviving”API4, or IAP4. BIRC5 is overexpressed in human cancer and plays a role in inhibition of apoptosis, resistance to chemotherapy and aggressiveness of tumors (Garg et al., 2016).

[0184] FRS2 is also known as “Fibroblast growth factor receptor substrate 2”, “FGFR-signaling adaptor SNT”, “Suc1-associated neurotrophic factor target 1”, or SNT-1. FRS2 is overexpressed and amplified in several cancer types. It serves as a docking protein for receptor tyrosine kinases, which mediate proliferation, survival, migration, and differentiation (Luo and Hahn, 2015). Baseline levels of anti-FRS2 also predict both response to anti-CTLA-4 treatment (Table 5) and the development of irAE (Table 6).

[0185] BCL7B also known as § B-cell CLL/lymphoma 7 protein family member B″ is a member of the BCL7 gene family, which is involved in the modulation of multiple pathways, including Wnt and apoptosis. The BCL7 family is involved in cancer incidence, progression, and development (Uehara et al., 2015).

[0186] RPS6KA1 is also known as “Ribosomal protein S6 kinase alpha-1 (EC:2.7.11.1)”, “MAP kinase-activated protein kinase 1a”, p90RSK1, RSK-1, or MAPKAPK1A. The RSK (90 kDa ribosomal S6 kinase) family comprises a group of highly related serine/threonine kinases that regulate diverse cellular processes, including cell growth, proliferation, survival and motility. Dysregulated RSK expression and activity has been associated with multiple cancer types (Houles and Roux, 2017).

[0187] GPHN is also known as “Gephyrin”, “Molybdopterin adenylyltransferase (EC:2.7.7.75)”, MPT, or KIAA1385. Gephyrin is a 93 kDa multi-functional protein that is a component of the postsynaptic protein network of inhibitory synapses. In non-neuronal tissues, the encoded protein is also required for molybdenum cofactor biosynthesis, a cofactor of sulfite oxidase, aldehyde oxidase, and xanthine oxidoreductase (Smolinsky et al., 2008). Besides predicting response to anti-CTLA-4 therapy, GPHN is also a useful marker to discriminate melanoma patients from normal humans (Table 2) and predicts DCR in melanoma patients treated with different checkpoint inhibitors (Table 3).

TABLE 5
Autoantibodies associated with PFS, OS and DCR
in melanoma patients treated with ipilimumab

| | | | | | SAM | SAMR |
|---|---|---|---|---|---|---|
| | | | R-value | R-value | Score.d.DCR | Fold.Change |
| ID | Gene ID | Gene Symbol | PFS | OS | at T0 | DCR at T0 |
| 5 | 10818 | FRS2 | 0.21 | 0.2 | 2.23 | 2.55 |
| 15 | 10243 | GPHN | 0.16 | 0.24 | 2.18 | 1.68 |
| 33 | 332 | BIRC5 | 0.05 | 0.06 | 1.8 | 1.54 |
| 39 | 3646 | EIF3E | 0.08 | 0.33 | 1.09 | 1.31 |
| 40 | 64946 | CENPH | 0.18 | 0.31 | 0.88 | 1.31 |
| 21 | 64895 | PAPOLG | 0.28 | 0.37 | 0.53 | 1.14 |
| 43 | 3364 | HUS1 | 0.34 | 0.16 | −0.01 | 1 |
| 41 | 55970 | GNG12 | 0.32 | 0.24 | −0.21 | 0.95 |
| 42 | 79714 | CCDC51 | −0.32 | −0.15 | −0.34 | 0.88 |
| 37 | 79650 | USB1 | −0.16 | −0.06 | −1.81 | 0.6 |
| 1 | 23151 | GRAMD4 | −0.3 | −0.32 | −1.92 | 0.58 |
| 36 | 6195 | RPS6KA1 | −0.2 | −0.17 | −1.92 | 0.61 |
| 38 | 9275 | BCL7B | −0.1 | −0.17 | −1.95 | 0.48 |

### Example 12: Identification of Autoantibodies Associated with irAEs in Patients Treated with Ipilimumab

[0188] Autoantibodies predicting irAEs were identified in pre-treatment samples from patients receiving anti-CTLA-4 therapy. To evaluate the difference in autoantibody levels between patients experiencing an irAE and those who do not, the statistical test SAM was applied.

[0189] Table 6 includes 13 autoantibodies reacting with EOMES, CREB3L1, FRS2, PLIN2, SIPA1L1, ABCB8, MAPT, ATG4D, XRCC5, XRCC6, UBAP1, TRIP4, and EIF4E2, which appear to predict irAEs in baseline samples. A positive fold-change indicates higher autoantibody levels in the group of melanoma patients who experience an irAE, whereas a negative fold-change indicates higher autoantibody levels in patients who do not develop an irAE.

[0190] Table 4 includes eight autoantibodies, POLR3B, ELMO2, SUMO2, RFWD2, SQSTM1, SDCBP, HSPD1, and IL17A, which predict that patients having higher autoantibody levels do not develop an irAE.

TABLE 6
Baseline autoantibodies predicting irAEs in
melanoma patients treated with ipilimumab

| | | | SAM | SAM |
|---|---|---|---|---|
| | Gene | Gene | Score.d.irAE | Fold.Change |
| ID | ID | Symbol | at T0 | irAE at T0 |
| 26 | 8320 | EOMES | 2.30 | 2.82 |
| 3 | 90993 | CREB3L1 | 2.28 | 2.60 |
| 5 | 10818 | FRS2 | 2.11 | 2.28 |
| 131 | 123 | PLIN2 | 2.11 | 2.13 |
| 115 | 26037 | SIPA1L1 | 1.96 | 1.85 |
| 133 | 11194 | ABCB8 | 1.93 | 1.47 |
| 113 | 4137 | MAPT | 1.87 | 1.58 |
| 28 | 84971 | ATG4D | 1.83 | 1.34 |
| 24 | 7520 | XRCC5 | 1.82 | 1.55 |
| 25 | 2547 | XRCC6 | 1.82 | 1.55 |
| 118 | 51271 | UBAP1 | 1.81 | 1.75 |
| 117 | 9325 | TRIP4 | 1.81 | 1.57 |
| 110 | 9470 | EIF4E2 | 1.81 | 1.62 |
| 114 | 55703 | POLR3B | −1.84 | 0.55 |
| 29 | 63916 | ELMO2 | −1.89 | 0.55 |
| 116 | 6613 | SUMO2 | −1.91 | 0.63 |
| 132 | 64326 | RFWD2 | −1.99 | 0.67 |
| 134 | 8878 | SQSTM1 | −2.02 | 0.69 |
| 16 | 6386 | SDCBP | −2.03 | 0.64 |
| 111 | 3329 | HSPD1 | −2.10 | 0.44 |
| 112 | 3605 | IL17A | −2.19 | 0.60 |

[0191] FIG. 9 shows Box-and-Whisker plots of six baseline autoantibodies, FRS2, SIPA1L1, XRCC5/XRCC6, IL17A, SQSTM1, and SDCBP, which are associated with the development of irAE in ipilimumab-treated patients.

[0192] Baseline levels of FRS2 predict both response to ipilimumab (Table 5) and the development of irAEs (Table 6).

[0193] SIPA1L1 is also known as “signal-induced proliferation-associated 1-like protein 1”, “High-risk human papilloma viruses E6 oncoproteins targeted protein 1”, E6TP1, or. KIAA0440. Besides predicting the development of irAEs, SIPA1L1 is also a useful marker to discriminate melanoma patients from normal humans (Table 2).

[0194] A dimer of the antigens XRCC5 and XRCC6 form the Lupus Ku autoantigen protein. Higher baseline levels of autoantibodies to XRCC5/XRCC6 predict the development of irAE in ipilimumab treated patients. XRCC5 is also known as “X-ray repair cross-complementing protein 5”, Lupus Ku autoantigen protein p86, Ku80, or Ku86. XRCC6 is also known as “X-ray repair cross-complementing protein 6”, 70 kDa subunit of Ku antigen, Lupus Ku autoantigen protein p70, Ku70, or thyroid-lupus autoantigen. Besides predicting the development of iRAE following anti-CTLA-4 therapy, XRCC5/XRCC6 also predict clinical response defined as DCR in melanoma patients treated with the PD-1/PD-L1 pathway blocker pembrolizumab (Table 7).

[0195] Higher levels of anti-IL17A antibodies are found in patients who do not develop irAEs following ipilimumab treatment. IL17A is also known as “interleukin 17A”, CTLA8; or IL-17. IL17 and is a proinflammatory cytokine produced by activated T cells.

[0196] SQSTM1 is also known as “sequestosome 1”, p60, p62, A170, DMRV, OSIL, PDB3, ZIPS, p62B, NADGP, or FTDALS3. SQSTM1 is an autophagosome cargo protein that targets other proteins that bind to it for selective autophagy. It is also interacts with signaling molecules to promote the expression of inflammatory genes (Moscat et al., 2016). Anti-SQSTM1 antibodies are found in melanoma patients who do not develop irAE following ipilimumab treatment.

### Example 13: Identification of Autoantibodies Associated or Predicting Survival and Clinical Response to Pembrolizumab Treatment

[0197] To identify autoantibodies that allow to identify patients who benefit from treatment with PD-1/PD-L1 pathway inhibitors, serum samples from 41 melanoma patients treated with pembrolizumab were analyzed.

[0198] Biomarkers correlating with progression-free survival (PFS) or overall survival (OS) were calculated using Spearman's correlation. To evaluate the difference in autoantibody levels between the clinical outcomes DCR and PD, the statistical test SAM was applied.

[0199] Table 7 lists 42 autoantibody targets, which are associated with response or non-response to pembrolizumab therapy: NOVA2, EOMES, SSB, IGF2BP2, ACTB, MLLT6, SNRPD1, TRAF3IP3, C17orf85, HES1, GSK3A, XRCC5, XRCC6, PPP1R2, C15orf48, PTPRR, MAZ, FLNA, TEX264, SNRNP70, CEP131, SNRPA, CENPV, NRIP1, CCNB1, RALY, FGA, CALR, GNAI2, IL36RN, S100A14, MMP3, SHC1, CSNK2A1, DFFA, LAMC1, S100A8, HDAC1, MSH2, CEACAM5, DHFR, and ARRB1.

[0200] Higher serum levels of ten autoantibodies were positively correlated with longer overall survival (OS, Spearman's correlation r>0.3): TRAF3IP3, C17orf85, HES1, CCNB1, SNRPD1, FGA, CALR, NRIP1, CSNK2A1, and SSB.

[0201] There were also four autoantibodies that were inversely correlated with overall survival and associated with shorter survival (Spearman's r<−0.3). SHC1, MMP3, GNAI2, and IL36RN.

[0202] Table 7 includes 19 baseline autoantibodies, which were elevated in patients, who achieve DCR following pembrolizumab treatment (SAM Score d>1.8): NOVA2, EOMES, SSB, IGF2BP2, ACTB, MLLT6, SNRPD1, TRAF3IP3, C17orf85, HES1, GSK3A, XRCC5, XRCC6, PPP1R2, C15orf48, PTPRR, MAZ, FLNA, and TEX264.

[0203] Furthermore, there were also an autoantibody signature comprising eight baseline autoantibodies that were elevated in patients with progressive disease (PD), who do not respond to pembrolizumab therapy (SAM DCR Score d<−1.8): ARRB1, DHFR, CEACAM5, MSH2, HDAC1, S100A8, LAMC1, and DFFA.

TABLE 7
Autoantibodies associated with PFS, OS and DCR
in melanoma patients treated with pembrolizumab

| | | | | | | | SAM |
|---|---|---|---|---|---|---|---|
| | | | | | | SAM | Fold-change |
| | | | R-value | R-value | R-value | Score d DCR | DCR at |
| ID | Gene ID | Gene Symbol | PFS | OS | DCR | at T0 | T0 |
| 8 | 4858 | NOVA2 | 0.40 | 0.24 | 0.35 | 2.79 | 4.48 |
| 26 | 8320 | EOMES | 0.31 | 0.15 | 0.38 | 2.31 | 4.81 |
| 23 | 6741 | SSB | 0.52 | 0.32 | 0.41 | 2.30 | 2.12 |
| 14 | 10644 | IGF2BP2 | 0.26 | 0.13 | 0.33 | 2.29 | 2.45 |
| 72 | 60 | ACTB | 0.27 | 0.09 | 0.32 | 2.19 | 2.28 |
| 73 | 4302 | MLLT6 | 0.27 | 0.09 | 0.32 | 2.19 | 2.28 |
| 22 | 6632 | SNRPD1 | 0.18 | 0.37 | 0.32 | 2.18 | 2.36 |
| 7 | 80342 | TRAF3IP3 | 0.49 | 0.41 | 0.42 | 2.18 | 1.67 |
| 4 | 55421 | C17orf85 | 0.38 | 0.38 | 0.29 | 2.12 | 2.46 |
| 19 | 3280 | HES1 | 0.26 | 0.37 | 0.33 | 1.96 | 2.25 |
| 76 | 2931 | GSK3A | 0.27 | 0.18 | 0.27 | 1.95 | 3.08 |
| 24 | 7520 | XRCC5 | 0.27 | 0.12 | 0.26 | 1.93 | 1.78 |
| 25 | 2547 | XRCC6 | 0.27 | 0.12 | 0.26 | 1.93 | 1.78 |
| 51 | 5504 | PPP1R2 | 0.23 | 0.16 | 0.32 | 1.93 | 2.33 |
| 9 | 84419 | C15orf48 | 0.24 | 0.18 | 0.34 | 1.91 | 1.58 |
| 81 | 5801 | PTPRR | 0.23 | 0.27 | 0.30 | 1.89 | 2.16 |
| 80 | 4150 | MAZ | 0.17 | 0.11 | 0.23 | 1.88 | 3.54 |
| 84 | 2316 | FLNA | 0.12 | −0.05 | 0.13 | 1.87 | 2.62 |
| 2 | 51368 | TEX264 | 0.37 | 0.23 | 0.25 | 1.87 | 2.66 |
| 55 | 6625 | SNRNP70 | 0.40 | 0.27 | 0.24 | 1.70 | 1.70 |
| 92 | 22994 | CEP131 | 0.41 | 0.25 | 0.23 | 1.68 | 1.98 |
| 56 | 6626 | SNRPA | 0.43 | 0.26 | 0.23 | 1.52 | 1.94 |
| 91 | 201161 | CENPV | 0.41 | 0.23 | 0.41 | 1.36 | 1.41 |
| 50 | 8204 | NRIP1 | 0.34 | 0.35 | 0.23 | 1.01 | 1.42 |
| 85 | 891 | CCNB1 | 0.30 | 0.37 | 0.20 | 0.99 | 1.42 |
| 53 | 22913 | RALY | 0.39 | 0.23 | 0.16 | 0.92 | 1.57 |
| 34 | 2243 | FGA | 0.17 | 0.36 | 0.22 | 0.74 | 1.13 |
| 87 | 811 | CALR | 0.14 | 0.36 | 0.20 | 0.50 | 1.16 |
| 89 | 2771 | GNAI2 | −0.39 | −0.31 | −0.02 | 0.33 | 1.09 |
| 52 | 26525 | IL36RN | −0.36 | −0.30 | −0.06 | 0.30 | 1.12 |
| 54 | 57402 | S100A14 | −0.38 | −0.15 | −0.14 | −0.12 | 0.94 |
| 20 | 4314 | MMP3 | −0.35 | −0.35 | −0.22 | −0.49 | 0.87 |
| 86 | 6464 | SHC1 | −0.20 | −0.37 | −0.24 | −0.77 | 0.86 |
| 13 | 1457 | CSNK2A1 | 0.21 | 0.35 | −0.07 | −1.05 | 0.63 |
| 82 | 1676 | DFFA | −0.17 | −0.12 | −0.40 | −1.80 | 0.60 |
| 78 | 3915 | LAMC1 | −0.03 | −0.11 | −0.29 | −1.82 | 0.41 |
| 6 | 6279 | S100A8 | −0.26 | 0.07 | −0.14 | −1.87 | 0.64 |
| 77 | 3065 | HDAC1 | −0.11 | −0.14 | −0.22 | −1.90 | 0.56 |
| 79 | 4436 | MSH2 | −0.12 | −0.11 | −0.11 | −2.05 | 0.43 |
| 75 | 1048 | CEACAM5 | −0.02 | 0.00 | −0.30 | −2.13 | 0.56 |
| 83 | 1719 | DHFR | −0.31 | −0.28 | −0.33 | −2.25 | 0.59 |
| 74 | 408 | ARRB1 | −0.28 | −0.16 | −0.33 | −2.92 | 0.31 |

[0204] FIG. 10 shows Box-and-Whisker plots of four baseline autoantibodies targeting IGF2BP2, SNRPD1, TRAF3IP3, and ARRB1 predicting DCR or PD to pembrolizumab.

[0205] Elevated levels of baseline anti-IGFBP2 autoantibodies predict clinical response as defined as DCR in patients treated with ipilimumab and other checkpoint inhibitors (Table 3).

[0206] TRAF3IP3 is also known as “TRAF3-interacting JNK-activating modulator”, “TRAF3-interacting protein 3”, or T3JAM. TRAF3IP3 is specifically expressed in immune organs and tissues and plays a role in T and/or B cell development (Peng et al., 2015).

[0207] SNRPD1 is also known as “small nuclear ribonucleoprotein Sm D1”, snRNP core protein D1, and is core component small nuclear ribonucleoprotein (snRNP) complexes. SNRPD1 or Sm-D1 is a known autoantigen and autoantibodies against this protein are specifically associated with the autoimmune disease systemic lupus erythematosus (SLE).

[0208] ARRB1 is also known as “beta-arrestin-1”, or ARR1. ARRB1 is is critical for CD4+ T cell survival and is a factor in susceptibility to autoimmunity (Shi et al., 2007). Anti-ARRB1 antibodies are found in baseline samples of melanoma patients with clinical non-response (PD) to pembrolizumab therapy.

### Example 14: Identification of Autoantibodies Associated with irAEs in Patients Treated with Pembrolizumab

[0209] Table 8 lists 35 baseline autoantibodies that are associated with the development of irAEs in patients treated with pembrolizumab.

[0210] Twenty-seven autoantibodies show higher reactivity in baseline samples and predict the development of irAE: FADD, OGT, HSPB1, CAP2, FN1, CTSW, ATP13A2, SIGIRR, TEX264, HSPA1B, SPTB, PDCD6IP, MITF, RAPGEF3, KRT7, ERBB3, PECAM1, PPL, TONSL, ELMO2, LAMB2, BTRC, SUFU, LGALS3BP, KLKB1, EGFR, and TOLLIP.

[0211] Eight autoantibodies showed higher reactivity in the group of melanoma patients who do not develop irAE: CXXC1, SPA17, LARP1, EGLN2, RPRM, WHSC1L1, MIF, and S100A8.

TABLE 8
Baseline autoantibodies predicting irAEs in
melanoma patients treated with pembrolizumab

| | | | SAM | SAM |
|---|---|---|---|---|
| | Gene | Gene | Score.d.iRAE | Fold.Change |
| ID | ID | Symbol | at T0 | irAE at T0 |
| 99 | 8772 | FADD | 3.08 | 2.83 |
| 54 | 8473 | OGT | 2.94 | 2.53 |
| 46 | 3315 | HSPB1 | 2.67 | 3.05 |
| 13 | 10486 | CAP2 | 2.59 | 2.35 |
| 153 | 2335 | FN1 | 2.55 | 2.40 |
| 94 | 1521 | CTSW | 2.43 | 2.30 |
| 90 | 23400 | ATP13A2 | 2.39 | 2.99 |
| 158 | 59307 | SIGIRR | 2.37 | 3.26 |
| 7 | 51368 | TEX264 | 2.31 | 3.14 |
| 20 | 3304 | HSPA1B | 2.14 | 2.37 |
| 21 | 6710 | SPTB | 2.14 | 2.37 |
| 27 | 10015 | PDCD6IP | 2.13 | 2.14 |
| 156 | 4286 | MITF | 2.13 | 2.48 |
| 83 | 10411 | RAPGEF3 | 2.12 | 3.48 |
| 154 | 3855 | KRT7 | 2.11 | 2.81 |
| 121 | 2065 | ERBB3 | 2.05 | 1.74 |
| 55 | 5175 | PECAM1 | 2.03 | 1.86 |
| 157 | 5493 | PPL | 2.01 | 2.12 |
| 162 | 4796 | TONSL | 1.98 | 2.44 |
| 142 | 63916 | ELMO2 | 1.89 | 1.98 |
| 155 | 3913 | LAMB2 | 1.89 | 2.25 |
| 151 | 8945 | BTRC | 1.87 | 2.05 |
| 160 | 51684 | SUFU | 1.87 | 1.81 |
| 52 | 3959 | LGALS3BP | 1.84 | 1.66 |
| 50 | 3818 | KLKB1 | 1.83 | 1.48 |
| 152 | 1956 | EGFR | 1.81 | 2.07 |
| 161 | 54472 | TOLLIP | 1.81 | 1.79 |
| 97 | 30827 | CXXC1 | −1.83 | 0.50 |
| 159 | 53340 | SPA17 | −1.85 | 0.43 |
| 51 | 23367 | LARP1 | −1.85 | 0.55 |
| 77 | 112398 | EGLN2 | −1.86 | 0.69 |
| 86 | 56475 | RPRM | −1.90 | 0.52 |
| 87 | 54904 | WHSC1L1 | −1.94 | 0.53 |
| 10 | 4282 | MIF | −2.11 | 0.54 |
| 6 | 6279 | S100A8 | −2.19 | 0.61 |

[0212] FIG. 11 shows Box-and-Whisker plots of four baseline autoantibody targets, FADD, FN1, HSPB1, and OGT, predicting irAE in pembrolizumab-treated patients.

[0213] Elevated autoantibodies directed against the pro-inflammatory cytokines S100A8 and MIF were found in melanoma patients who do not develop irAEs following pembrolizumab treatment.

[0214] MIF is also known as “Macrophage migration inhibitory factor (EC:5.3.2.1)”, “Glycosylation-inhibiting factor”, L-dopachrome tautomerase (EC:5.3.3.12), “Phenylpyruvate tautomerase”, GLIF, or MIF. MIF is a broad-spectrum proinflammatory cytokine, which plays a role in inflammatory and autoimmune diseases, but also has tumor-promoting effects (Kindt et al., 2016).

[0215] S100A8 is also known as “Protein S100-A8”, “Calgranulin-A”, “Calprotectin L1L subunit”, “Migration inhibitory factor-related protein 8”, CFAG, or MRP8. S100A8 is a calcium- and zinc-binding protein, which plays a prominent role in the regulation of inflammatory processes and immune response. In many cancer types including melanoma, overexpression of 100A8 contributes to the growth, metastasis, angiogenesis and immune evasion of tumors (Bresnick et al., 2015). Elevated levels of anti-S100A8 antibodies were also found in melanoma patients with progressive disease following pembrolizumab.

[0216] FADD is an also known as “FAS-associated death domain protein”, “Growth-inhibiting gene 3 protein”, “Mediator of receptor induced toxicity”, MORT1, or GIG3. FADD is an adaptor protein that bridges members of the tumor necrosis factor receptor superfamily, such as the Fas-receptor, to procaspases 8 and 10 to form the death-inducing signaling complex (DISC) during apoptosis. FADD has an important role in apoptosis, cell cycle regulation and cell survival, so that it can exert both tumor-suppressive and tumor-promoting roles. FADD is also is involved in inflammatory processes in autoimmune diseases (Cuda et al., 2016).

[0217] FN1 is also known as “Fibronectin”, “Cold-insoluble globulin”, or CIG. Fibronectin is a component of the extracellular matrix that plays a role in wound healing. In cancer, fibronectin promotes tumor growth/survival and resistance to therapy.

[0218] HSBP1 is also known as “Heat shock protein beta-1”, “28 kDa heat shock protein”, “Estrogen-regulated 24 kDa protein”, “Heat shock 27 kDa protein”, HSP27, or HSP28. HSBP1 is a multifunctional protein, which acts as a protein chaperone and an antioxidant. In cancer, HSP27 plays a role in the inhibition of apoptosis.

[0219] OGT is also known as “UDP-N-acetylglucosamine-peptide N-acetylglucosaminyltransferase 110 kDa subunit (EC:2.4.1.2554)”, or “O-GlcNAc transferase subunit p110”. OGT catalyzes the O-GlcNAcylation of a number of nuclear and cytoplasmic proteins thereby modulating cellular development and signaling pathways. Many cancer types display elevated O-GlcNAcylation and aberrant expression of OGT linking metabolism to invasion and metastasis (Ferrer et al., 2016).

### Example 15: Development of Biomarkers for Predicting the Risk to Develop an irAE

[0220] Multi-cohort metastatic melanoma samples for developing biomarker panels for irAE were obtained as follows.

[0221] Serum samples from 333 metastatic melanoma patients were collected at 5 European cancer centers prior to treatment with the following therapeutic monoclonal antibodies ipilimumab (ipi, anti-CTLA-4), nivolumab (nivo, anti-PD-1), pembrolizumab (pembro, anti-PD-1), or ipilimumab with nivolumab combination therapy (FIG. 12). Serum samples were analyzed using a cancer immunotherapy antigen array (FIG. 1) comprising 832 antigens and were used to develop autoantibody biomarker panels for irAE and its subtype colitis.

[0222] All individuals provided written informed consent and the study was approved by the respective Ethics Committees. Patient data were provided including demographics (age, gender), treatment, date of therapy start, and best response (RECIST 1.1. criteria. Furthermore, irAEs were recorded including onset date and grade. As the risk for colitis might influence treatment choice in metastatic melanoma, namely the decision for anti-PD-1 monotherapy or ipi/nivo combination treatment we included colitis as an irAE of special interest.

[0223] The 333 included patients had a median age of 61 years, 38% were female. Overall, 103 patients (31%) developed irAEs including 44 patients with colitis (13%). Of the 98 patients who were treated with ipi monotherapy, 34 patients (35%) experienced an irAE of any grade and type, and 17 (17%) had colitis. Of 152 patients who were treated with pembrolizumab (pembro), 37 (24%) developed an irAE of any grade, 11 patients colitis (7%). 47 (31%) of pembro-treated patients had received ipi before, 14 patients (38%) of the irAE group and six (55%) of the colitis group. 64 patients were treated with ipi/nivo combination therapy of which 28 (44%) had any type of irAE and 15 had colitis (23%).

[0224] Statistical analysis for predicting the risk to develop an irAE was undertaken as follows.

[0225] To encode the different types of checkpoint inhibitors (anti-CTLA-4 and anti-PD-1) as a factor, we produced 5 modeling cohorts for data analysis (FIG. 12). We generated two CPI monotherapy groups (“ipi-mono” and pembro-never-ipi), which only include patients who received no other than the current CPI, and one combination therapy group “ipi/nivo”. Patients treated with ipi-mono, ipi-nivo or who have previously been treated with ipi were combined into the “ipi-ever” group. All 333 patients were also jointly investigated in the “all-treatments” analysis group.

[0226] To identify the most relevant biomarkers, we used a combination of linear and nonlinear data mining methods, which complement each other for feature selection. Significance Analysis of Microarrays (SAM) was used to compare patients according to the class label irAE or colitis. We used 1,000 permutations in a multiple testing approach for each autoantibody feature to ensure robust modeling. Feature ranking was achieved using the absolute value of the output d-score. Candidate biomarkers were included in the set of final biomarker candidates using a threshold of the SAM score |d|>1.8.

[0227] As a second approach for feature selection, Cox regression analysis was performed to investigate if pre-treatment autoantibody levels are related to the hazard ratio of an event using the R's survival package. For Cox regression the treatment regime was included using the three membership classes (PD1, CTLA4, PD1+CTLA4) as covariate factors. Within time-to-event, all relevant treatments with respect to the presence of PD1 or CTLA4 inhibition were considered in the covariate factor. The models were created in a one factor bottom up multiple testing approach (i.e. each biomarker was investigated one after another). For feature selection, we utilized the unadjusted p-value (p<0.05) of the Cox regression in combination with a minimum coefficient (coef>0.25). “Last contact” (and “death” for irAE and colitis) were taken to censor the data to acknowledge data points from patients dropped out.

[0228] Kaplan Meier curves were calculated in combination with the Logrank test (using “survdiff” from R's survival package) for the same groups as for Cox regression, except for the all treatments group (http://www.sthda.com/english/rpkgs/survminer). Time-to-event was recorded starting at CPI therapy. The autoantibody data were dichotomized into autoantibody high versus low using the mean MFI value+1 SD of the healthy control sera as a marker-specific threshold.

[0229] As a complementary approach for feature ranking, Random Forests (RF) were calculated. We used a modification of the two-class classification method described by [10] using the “Tree-ensemble-learner” from KNIME. A number of 10,000 different models were generated. The tree depth was limited to 4 to investigate small panels with shallow trees, minimum split node size was 10 with minimum child node size of 5. The fraction of training data used for each model was 80% and attribute sampling was sampling a square root of total attributes combined with resampling for each tree node. Feature ranking was performed creating a score of the relative marker contribution for the first two levels of each tree.

[0230] Final feature ranking was performed by ranking markers according to their appearance in the respective tests. Final marker selection was performed to yield markers, which were above threshold in at least three tests.

[0231] Table 9 shows the top 47 autoantibodies predicting irAE or colitis.

[0232] The predictive autoantibody signature comprises the following antigen specificities:

[0233] SUMO2, MAGED2, PIAS3, MITF, GRP, AP2B1, PRKCI, BTBD2, AKT2, UBE2Z, L1CAM, LAMC1, GABARAPL2, RPLP0, SDCBP, AP1S1, CFB, FGA, IL3, IL4R, AMPH, LEPR, TP53, GPHN, IL23A, BAG6, BICD2, TMEM98, KDM4A, UBTF, CASP8, PCDH1, RELT, SPTBN1, MUM1, RPLP2, KRT7, FN1, MAGEB4, CTSW, NCOA1, MIF, SPA17, FGFR1, KRT19, TPM2, ATG4D.

[0234] FIG. 13 summarizes the statistical test results and highlights autoantibodies that positively (black circles) or negatively (white circles) predict irAE or colitis.

TABLE 9
List of top 47 marker predicting irAE or colitis
The thresholds were: SAM analysis (Score d > 1.8) and Cox
regression analysis (p < 0.05, coefficient 0 > .25) in any of the
modeling cohorts.

| | | Gene | | | | | |
|---|---|---|---|---|---|---|---|
| | | Symbol | | | | | |
| | | (and | | | | | |
| | | Exemplary | | | | | |
| | Gene | Antigen | | Colitis | | IRAE | |
| No | ID | Sequence) | Gene name | SAM | Cox | SAM | Cox |
| 10 | 4282 | MIF | Macrophage migration | | | x | x |
| | | | inhibitory factor | | | | |
| 15 | 10243 | GPHN | Gephyrin | x | x | | x |
| 16 | 6386 | SDCBP | Syntenin-1 | | x | x | x |
| 28 | 84971 | ATG4D | Cysteine protease | | | x | x |
| | | | ATG4D | | | | |
| 34 | 2243 | FGA | Fibrinogen alpha | | x | | |
| | | | chain | | | | |
| 61 | 6181 | RPLP2 | 60S acidic ribosomal | x | x | x | x |
| | | | protein P2 | | | | |
| 69 | 1521 | CTSW | Cathepsin W | x | | x | x |
| 78 | 3915 | LAMC1 | Laminin subunit | x | x | x | |
| | | | gamma-1 | | | | |
| 90 | 2260 | FGFR1 | Fibroblast growth | | | x | x |
| | | | factor receptor 1 | | | | |
| | | | (CD331) | | | | |
| 116 | 6613 | SUMO2 | Small ubiquitin- | x | x | x | x |
| | | | related modifier 2 | | | | |
| 122 | 3855 | KRT7 | Cytokeratin-7 | x | x | x | x |
| 124 | 4286 | MITF | Microphthalmia- | x | x | x | |
| | | | associated | | | | |
| | | | transcription factor | | | | |
| 127 | 53340 | SPA17 | Sperm surface | | | x | x |
| | | | protein Sp17 (CT22) | | | | |
| 136 | 10401 | PIAS3 | E3 SUMO-protein | x | x | x | x |
| | | (SEQ ID | ligase PIAS3 | | | | |
| | | NO: 136) | | | | | |
| 137 | 11345 | GABARAPL2 | (GABA(A) receptor- | x | x | | x |
| | | (SEQ ID | associated protein- | | | | |
| | | NO: 137) | like 2 | | | | |
| 138 | 10916 | MAGED2 | Melanoma-associated | x | x | x | |
| | | (SEQ ID | antigen D2 | | | | |
| | | NO: 138) | | | | | |
| 139 | 208 | AKT2 | RAC-beta | x | x | | x |
| | | (SEQ ID | serine/threonine- | | | | |
| | | NO: 139) | protein kinase | | | | |
| 140 | 273 | AMPH | Amphiphysin | x | x | x | x |
| | | (SEQ ID | | | | | |
| | | NO: 140) | | | | | |
| 141 | 55643 | BTBD2 | BTB/POZ domain- | x | x | x | |
| | | (SEQ ID | containing protein 2 | | | | |
| | | NO: 141) | | | | | |
| 142 | 65264 | UBE2Z | Ubiquitin- | x | x | | x |
| | | (SEQ ID | conjugating enzyme | | | | |
| | | NO: 142) | E2 Z | | | | |
| 143 | 6175 | RPLP0 | 60S acidic ribosomal | x | x | | x |
| | | (SEQ ID | protein P0 | | | | |
| | | NO: 143) | | | | | |
| 144 | 1174 | AP1S1 | AP-1 complex subunit | | x | | x |
| | | (SEQ ID | sigma-1A | | | | |
| | | NO: 144) | | | | | |
| 145 | 3953 | LEPR | Leptin receptor | x | x | x | |
| | | (SEQ ID | (CD295) | | | | |
| | | NO: 145) | | | | | |
| 146 | 51561 | IL23A | Interleukin-23 | x | x | | x |
| | | (SEQ ID | subunit alpha (IL- | | | | |
| | | NO: 146) | 23p19) | | | | |
| 147 | 7157 | TP53 | Cellular tumor | x | x | x | |
| | | (SEQ ID | antigen p53 | | | | |
| | | NO: 147) | | | | | |
| 148 | 2922 | GRP | Gastrin-releasing | x | x | | |
| | | (SEQ ID | peptide | | | | |
| | | NO: 148) | | | | | |
| 149 | 5584 | PRKCI | Protein kinase C | x | x | | |
| | | (SEQ ID | iota type | | | | |
| | | NO: 149) | | | | | |
| 150 | 163 | AP2B1 | AP-2 complex subunit | x | x | | |
| | | (SEQ ID | beta | | | | |
| | | NO: 150) | | | | | |
| 151 | 3897 | L1CAM | Neural cell adhesion | x | x | | |
| | | (SEQ ID | molecule L1 (CD171) | | | | |
| | | NO: 151) | | | | | |
| 152 | 841 | CASP8 | Caspase-8 | x | x | | |
| | | (SEQ ID | | | | | |
| | | NO: 152) | | | | | |
| 153 | 629 | CFB | Complement factor B | | x | | |
| | | (SEQ ID | | | | | |
| | | NO: 153) | | | | | |
| 154 | 5097 | PCDH1 | Protocadherin-1 | x | x | | |
| | | (SEQ ID | | | | | |
| | | NO: 154) | | | | | |
| 155 | 6711 | SPTBN1 | Spectrin beta chain | x | x | | |
| | | (SEQ ID | | | | | |
| | | NO: 155) | | | | | |
| 156 | 3562 | IL3 | Interleukin-3 | | x | | |
| | | (SEQ ID | | | | | |
| | | NO: 156) | | | | | |
| 157 | 26022 | TMEM98 | Transmembrane | x | x | | |
| | | (SEQ ID | protein 98 (Protein | | | | |
| | | NO: 157) | TADA1) | | | | |
| 158 | 84957 | RELT | Tumor necrosis | x | x | | |
| | | (SEQ ID | factor receptor | | | | |
| | | NO: 158) | superfamily member | | | | |
| | | | 19L | | | | |
| 159 | 7917 | BAG6 | Large proline-rich | x | x | | |
| | | (SEQ ID | protein BAG6 | | | | |
| | | NO: 159) | | | | | |
| 160 | 9682 | KDM4A | Lysine-specific | x | x | | |
| | | (SEQ ID | demethylase 4A | | | | |
| | | NO: 160) | | | | | |
| 161 | 7343 | UBTF | Nucleolar | x | x | | |
| | | (SEQ ID | transcription factor | | | | |
| | | NO: 161) | 1 (Autoantigen NOR- | | | | |
| | | | 90) | | | | |
| 162 | 23299 | BICD2 | Protein bicaudal D | x | x | | |
| | | (SEQ ID | homolog 2 | | | | |
| | | NO: 162) | | | | | |
| 163 | 3566 | IL4R | Interleukin-4 | | x | | |
| | | (SEQ ID | receptor subunit | | | | |
| | | NO: 163) | alpha (CD124) | | | | |
| 164 | 84939 | MUM1 | Mutated melanoma- | x | x | x | x |
| | | (SEQ ID | associated antigen 1 | | | | |
| | | NO: 164) | | | | | |
| 165 | 2335 | FN1 | Fibronectin | x | x | x | x |
| | | (SEQ ID | | | | | |
| | | NO: 165) | | | | | |
| 166 | 4115 | MAGEB4 | Melanoma-associated | | x | x | x |
| | | (SEQ ID | antigen B4 | | | | |
| | | NO: 166) | | | | | |
| 167 | 8648 | NCOA1 | Nuclear receptor | | | x | x |
| | | (SEQ ID | coactivator 1 | | | | |
| | | NO: 167) | | | | | |
| 168 | 7169 | TPM2 | Tropomyosin beta | | | x | x |
| | | (SEQ ID | chain | | | | |
| | | NO: 168) | | | | | |
| 169 | 3880 | KRT19 | Cytokeratin-19 | | | x | x |
| | | (SEQ ID | | | | | |
| | | NO: 169) | | | | | |

[0235] Association rule mining was performed using the software Natto Ef Prime Inc. (Japan) and network graphs with corresponding associations were created. Autoantibody intensity data were categorized into 3 categories (low, medium and high intensity). We computed a description score as an index, which represents the proportion of uncertainty in Y that X can explain for each edge in the network as mutual information. We selected irAE and colitis as targets to highlight the relevant attributes, which have the highest description scores (mutual information) in the model.

### Example 16: Exploration of an Autoantibody Signature for Prediction of Colitis

[0236] This analysis yielded 34 autoantibodies for predicting colitis, which were found in three group comparisons as shown in FIG. 13.

[0237] The results of the Cox regression analysis and the associated hazard risk for developing an irAE in patients with high autoantibody levels is shown in Table 10 for the autoantibody signature predicting irAE and colitis.

[0238] The 35 autoantibodies comprise the following antigen specificities: SUMO2, MAGED2, PIAS3, MITF, GRP, AP2B1, PRKCI, BTBD2, AKT2, UBE2Z, L1CAM, LAMC1, GABARAPL2, RPLP0, SDCBP, AP1S1, CFB, FGA, IL3, IL4R, AMPH, LEPR, TP53, GPHN, IL23A, BAG6, BICD2, TMEM98, KDM4A, UBTF, CASP8, PCDH1, RELT, SPTBN1, MUM1.

[0239] 30 of the 34 antigens were identified in the ipi-ever group, demonstrating a strong association of anti-CTLA-4 therapy with the development of colitis (FIG. 13, Table 10). However, there were also differences seen in autoantibody patterns between ipi-mono and ipi/nivo combination therapy. For example, UBE2Z, L1CAM, GABARAPL2, CFB, IL3, RELT, FGA, and IL4R predict colitis in the ipi-mono group, whereas PIAS3, SUMO2, MITF, GRP, PRKCI, AP2B1, SDCBP, PDCH1, SPTBN1, and UBTF were predictive in the ipi/nivo cohort.

[0240] The markers with the highest score for predicting colitis were MAGED2, PIAS3, MITF, PRKC1, and A2B1 (FIG. 13). Two high scoring markers predicted a reduced risk to develop colitis, which were SUMO2, and GRP.

[0241] The marker with the highest score for predicting colitis was MAGED2 with significant associations found for the all treatment (HR 1.35, p=0.002), ipi-ever (HR 1.36, p=0.0012), CLTA4-mono (HR 1.48, p=0.024), and ipi/nivo group (HR 1.31, p=0.036). The marker with the smallest p-value in the ipi-ever group was PIAS3 with significant associations for the all treatment (HR 1.42, p=0.00005), ipi-ever (HR 1.46, p=0.000009), and ipi/nivo group (HR 1.52, p=0.0004). FIG. 13 shows the Kaplan-Meier curve for PIAS3.

[0242] Higher levels of SUMO2 autoantibodies predicted a lower risk to develop colitis in the all treatment (HR 0.53, p=0.0022), ipi-ever (HR 0.51, p=0.0026), ipi-mono (HR 0.32, p=0.0012), and ipi/nivo group (HR 0.5, p=0.049).

[0243] FIG. 13 shows examples of Kaplan-Meier curves for PIAS3 and SUM02.

TABLE 10
Results of Cox regression analysis of autoantibodies predicting colitis

| Gene | All Treatments | | Ipi Ever | | Ipi Mono | | Ipi/Nivo | | Pembro Never Ipi | |
|---|---|---|---|---|---|---|---|---|---|---|
| Symbol | P-value | HR | P-value | HR | P-value | HR | P-value | HR | P-value | HR |
| AKT2 | 0.0006 | 1.75 | 0.0008 | 1.80 | 0.0006 | 2.25 | 0.0307 | 1.96 | 0.1640 | 1.95 |
| AMPH | 0.3562 | 1.09 | 0.3764 | 1.09 | 0.0449 | 0.75 | 0.0020 | 1.70 | 0.4250 | 1.26 |
| AP1S1 | 0.0344 | 1.49 | 0.0124 | 1.58 | 0.0451 | 1.62 | 0.2169 | 1.45 | 0.2509 | 0.31 |
| AP2B1 | 0.0040 | 1.33 | 0.0092 | 1.30 | 0.5221 | 1.19 | 0.0165 | 1.31 | 0.2165 | 1.74 |
| ATG4D | 0.9413 | 1.02 | 0.6092 | 1.14 | 0.2384 | 1.44 | 0.7893 | 1.15 | 0.3340 | 0.36 |
| BAG6 | 0.0386 | 0.71 | 0.0430 | 0.69 | 0.1749 | 0.69 | 0.2718 | 0.76 | 0.5946 | 0.79 |
| BICD2 | 0.0128 | 0.58 | 0.0354 | 0.63 | 0.2746 | 0.67 | 0.0611 | 0.49 | 0.1658 | 0.30 |
| BTBD2 | 0.0052 | 1.37 | 0.0015 | 1.41 | 0.0205 | 1.47 | 0.0369 | 1.34 | 0.3489 | 0.55 |
| CASP8 | 0.0069 | 1.30 | 0.0175 | 1.28 | 0.2020 | 1.21 | 0.4043 | 1.23 | 0.2672 | 1.38 |
| CFB | 0.0296 | 2.00 | 0.0147 | 2.16 | 0.0029 | 2.73 | 0.6696 | 1.33 | 0.5528 | 0.41 |
| CTSW | 0.4987 | 1.11 | 0.6748 | 0.92 | 0.3918 | 0.75 | 0.3826 | 0.74 | 0.2066 | 1.38 |
| FGA | 0.0430 | 1.56 | 0.0135 | 1.72 | 0.0137 | 2.45 | 0.3334 | 1.46 | 0.1526 | 0.18 |
| FGFR1 | 0.1905 | 0.72 | 0.1950 | 0.71 | 0.4259 | 0.78 | 0.3725 | 0.61 | 0.8267 | 0.84 |
| FN1 | 0.2507 | 1.20 | 0.9314 | 1.02 | 0.8925 | 0.95 | 0.5645 | 0.78 | 0.0356 | 2.05 |
| GABARAPL2 | 0.0140 | 1.62 | 0.0036 | 1.84 | 0.0035 | 2.09 | 0.5476 | 0.70 | 0.5252 | 0.58 |
| GPHN | 0.0203 | 0.57 | 0.0062 | 0.48 | 0.0539 | 0.49 | 0.0583 | 0.34 | 0.4375 | 1.45 |
| GRP | 0.0025 | 0.71 | 0.0048 | 0.71 | 0.0696 | 0.69 | 0.0473 | 0.66 | 0.2100 | 0.50 |
| IL23A | 0.6077 | 0.90 | 0.0333 | 0.55 | 0.0928 | 0.41 | 0.1936 | 0.60 | 0.0232 | 1.86 |
| IL3 | 0.0258 | 1.31 | 0.0361 | 1.31 | 0.0351 | 1.56 | 0.7551 | 0.91 | 0.0928 | 2.41 |
| IL4R | 0.0444 | 1.74 | 0.0398 | 1.77 | 0.0283 | 2.15 | 0.1662 | 2.15 | 0.7443 | 0.72 |
| KDM4A | 0.0085 | 1.39 | 0.0027 | 1.45 | 0.4092 | 1.35 | 0.3540 | 1. 18 | 0.5818 | 0.68 |
| KRT19 | 0.5878 | 0.93 | 0.4218 | 0.88 | 0.7679 | 0.92 | 0.0944 | 0.58 | 0.4050 | 1.31 |
| KRT7 | 0.0166 | 1.25 | 0.0620 | 1.21 | 0.8772 | 1.03 | 0.1078 | 1.27 | 0.0360 | 1.74 |
| L1CAM | 0.0482 | 1.29 | 0.0171 | 1.38 | 0.0082 | 1.65 | 0.2069 | 1.36 | 0.4026 | 0.63 |
| LAMC1 | 0.0017 | 1.31 | 0.0015 | 1.33 | 0.1737 | 1.19 | 0.2561 | 1.18 | 0.8534 | 1.05 |
| LEPR | 0.1914 | 1.11 | 0.0730 | 1.17 | 0.0397 | 1.29 | 0.0357 | 1.31 | 0.6056 | 0.86 |
| MAGEB4 | 0.3248 | 1.11 | 0.1395 | 1.18 | 0.5536 | 1.11 | 0.0237 | 1.36 | 0.4077 | 0.68 |
| MAGED2 | 0.0020 | 1.35 | 0.0012 | 1.36 | 0.0241 | 1.38 | 0.0361 | 1.31 | 0.5827 | 0.65 |
| MIF | 0.0902 | 0.67 | 0.1591 | 0.71 | 0.4832 | 0.81 | 0.2980 | 0.57 | 0.3325 | 0.53 |
| MITF | 0.0018 | 1.28 | 0.0217 | 1.22 | 0.7467 | 0.95 | 0.0007 | 1.47 | 0.0484 | 1.54 |
| MUM1 | 0.3432 | 1.13 | 0.6524 | 0.93 | 0.4233 | 0.80 | 0.3924 | 1.19 | 0.0098 | 1.71 |
| NCOA1 | 0.0912 | 0.85 | 0.1552 | 0.87 | 0.1005 | 0.75 | 0.4389 | 1.11 | 0.1812 | 0.57 |
| PCDH1 | 0.0916 | 1.13 | 0.0204 | 1.20 | 0.2108 | 1.14 | 0.0147 | 1.35 | 0.2909 | 0.70 |
| PIAS3 | 0.0000 | 1.42 | 0.0000 | 1.46 | 0.2308 | 1.22 | 0.0004 | 1.52 | 0.8245 | 0.88 |
| PRKCI | 0.0002 | 1.39 | 0.0001 | 1.41 | 0.0601 | 1.35 | 0.0014 | 1.44 | 0.5171 | 0.64 |
| RELT | 0.0249 | 1.19 | 0.0116 | 1.23 | 0.0289 | 1.29 | 0.7263 | 0.92 | 0.9069 | 0.96 |
| RPLP0 | 0.0102 | 1.40 | 0.2227 | 1.22 | 0.0591 | 1.36 | 0.6500 | 0.79 | 0.0007 | 3.26 |
| RPLP2 | 0.1858 | 1.22 | 0.5715 | 1.10 | 0.3298 | 1.32 | 0.8022 | 1.06 | 0.0132 | 2.43 |
| SDCBP | 0.0068 | 0.44 | 0.0304 | 0.52 | 0.3783 | 0.73 | 0.0271 | 0.27 | 0.1167 | 0.24 |
| SPA17 | 0.8799 | 1.01 | 0.7909 | 1.02 | 0.2891 | 0.85 | 0.3274 | 1.13 | 0.9692 | 1.01 |
| SPTBN1 | 0.0460 | 1.21 | 0.0245 | 1.23 | 0.7310 | 1.05 | 0.0218 | 1.39 | 0.4612 | 0.79 |
| SUMO2 | 0.0022 | 0.53 | 0.0026 | 0.51 | 0.0093 | 0.32 | 0.0488 | 0.50 | 0.9235 | 0.96 |
| TMEM98 | 0.1323 | 0.85 | 0.0207 | 0.73 | 0.0516 | 0.64 | 0.5518 | 0.88 | 0.0107 | 1.77 |
| TP53 | 0.0118 | 1.29 | 0.4205 | 1.12 | 0.3735 | 1.15 | 0.5922 | 0.82 | 0.1227 | 1.29 |
| TPM2 | 0.9090 | 0.99 | 0.8150 | 1.03 | 0.9717 | 1.01 | 0.8859 | 1.03 | 0.2451 | 0.58 |
| UBE2Z | 0.0001 | 1.74 | 0.0000 | 1.79 | 0.0144 | 1.78 | 0.0976 | 1.41 | 0.2703 | 0.24 |
| UBTF | 0.0538 | 1.39 | 0.0119 | 1.52 | 0.8610 | 1.07 | 0.0214 | 1.53 | 0.0796 | 0.17 |

[0244] As single markers show very limited sensitivity to predict colitis, we explored association rules of markers exhibiting the highest mutual information for colitis. FIG. 16A shows a set of the best 10 markers for colitis prediction. The sets include markers predicting an increased risk (RELT, CASP8, UBE2Z, IL4R, LAMC1, L1CAM, MITF) but also a reduced risk (SUMO2, GRP, MIF) to develop colitis.

### Example 17: Exploration of an Autoantibody Signature Predicting irAE

[0245] A feature ranking approach was applied to select the 15 most important biomarker candidates for irAE shown in FIG. 13. The results of the Cox regression analysis and the associated hazard risk for developing an irAE in patients with high autoantibody levels is shown in Table 11.

[0246] The 15 most important autoantibody specificities for predicting an irAE are: PIAS3, RPLP2, NCOA1, ATG4D, KRT7, MIF, TPM2, GABARAPL2, SDCBP, MUM1, MAGEB4, CTSW, SPA17, FGFR1, KRT19.

[0247] Seven antigens were associated with an increased risk of irAE (PIAS3, RPLP2, ATG4D, KRT7, TPM2, GABARAPL2, and MAGEB4) and six antigens were associated with a reduced risk of irAE (NCOA1, MIF, SDCB4, MUM1, FGFR1, and KRT19). Therapy-related differences were also observed, for example, KRT7 and FN1 were only predictive in anti-PD-1 treated patients, whereas MAGEB4 and MAGED2 were preferentially predictive in anti-CTLA-4 therapies.

[0248] The top biomarker for irAE associated with anti-CTLA-4 therapy was PIAS3 with significant associations found for the all treatment group (HR 1.29, p=0.0001), the ipi-ever group (HR 1.29, p=0.0002; HR 1.35) and the ipi/nivo group (HR 1.32, p=0.0035).

[0249] The top candidate for therapies involving anti-PD1 therapy was KRT7 with significant associations found for the ipi/nivo group (HR 1.31, p=0.04) and pembro-never-ipi group (HR 1.55, p=0.0008).

[0250] FIG. 15 shows examples of Kaplan-Meier curves for PIAS3 and KRT7.

[0251] Therapy-related differences were found for autoantibodies predicting a reduced risk of irAE. Whereas MUM1 (HR 0.69, p=0.0074) and FGFR1 (HR 0.69, p=0.037) were associated with anti-CTLA-4 therapy (Ipi-ever group), MIF1 predicted a reduced risk of irAE for the pembro-never-ipi group (HR 0.49, p=0.032).

TABLE 11
Results of Cox regression analysis of autoantibodies predicting iRAE

| Gene | All Treatments | | Ipi Ever | | Ipi Mono | | Ipi/Nivo | | Pembro Never Ipi | |
|---|---|---|---|---|---|---|---|---|---|---|
| Symbol | P-value | HR | P-value | HR | P-value | HR | P-value | HR | P-value | HR |
| AKT2 | 0.3314 | 1.16 | 0.0328 | 1.44 | 0.0016 | 2.00 | 0.1799 | 1.54 | 0.2841 | 0.64 |
| AMPH | 0.1705 | 0.92 | 0.6275 | 0.97 | 0.0120 | 0.78 | 0.0835 | 1.24 | 0.1184 | 0.82 |
| AP1S1 | 0.1047 | 1.26 | 0.0341 | 1.39 | 0.0674 | 1.50 | 0.5742 | 1.16 | 0.4057 | 0.72 |
| AP2B1 | 0.0991 | 1.17 | 0.0577 | 1.20 | 0.9027 | 1.03 | 0.0578 | 1.22 | 0.8031 | 0.92 |
| ATG4D | 0.0007 | 1.38 | 0.0104 | 1.47 | 0.0002 | 2.85 | 0.7261 | 1.14 | 0.0102 | 1.41 |
| BAG6 | 0.4876 | 0.95 | 0.2034 | 0.88 | 0.1664 | 0.78 | 0.6080 | 0.93 | 0.4482 | 1.12 |
| BICD2 | 0.2381 | 1.12 | 0.3004 | 1.12 | 0.9776 | 0.99 | 0.2951 | 1.17 | 0.4416 | 1.14 |
| BTBD2 | 0.0059 | 1.27 | 0.0112 | 1.27 | 0.1549 | 1.26 | 0.0615 | 1.25 | 0.1832 | 1.37 |
| CASP8 | 0.0216 | 1.21 | 0.0210 | 1.22 | 0.2165 | 1.16 | 0.6609 | 1.09 | 0.7828 | 1.07 |
| CFB | 0.8012 | 1.07 | 0.5560 | 1.18 | 0.0829 | 1.71 | 0.7846 | 0.87 | 0.5894 | 0.68 |
| CTSW | 0.9341 | 0.99 | 0.2161 | 0.84 | 0.7345 | 0.93 | 0.0459 | 0.56 | 0.0286 | 1.40 |
| FGA | 0.8311 | 1.04 | 0.6930 | 1.08 | 0.3998 | 1.28 | 0.6633 | 1.15 | 0.8176 | 0.90 |
| FGFR1 | 0.0092 | 0.64 | 0.0366 | 0.69 | 0.1384 | 0.71 | 0.3325 | 0.71 | 0.1673 | 0.56 |
| FN1 | 0.7124 | 0.96 | 0.0883 | 0.75 | 0.2792 | 0.74 | 0.1251 | 0.58 | 0.0135 | 1.58 |
| GABARAPL2 | 0.0326 | 1.35 | 0.0049 | 1.66 | 0.0112 | 1.90 | 0.6362 | 1.22 | 0.7671 | 1.14 |
| GPHN | 0.5741 | 0.93 | 0.0867 | 0.76 | 0.8016 | 0.95 | 0.0756 | 0.60 | 0.0074 | 1.63 |
| GRP | 0.1150 | 0.91 | 0.3888 | 0.94 | 0.9402 | 1.01 | 0.4915 | 0.92 | 0.2440 | 0.84 |
| IL23A | 0.7794 | 0.96 | 0.1160 | 0.76 | 0.0775 | 0.53 | 0.6231 | 0.88 | 0.0136 | 1.47 |
| IL3 | 0.1571 | 1.15 | 0.3842 | 1.10 | 0.2913 | 1.23 | 0.3890 | 0.83 | 0.3693 | 1.28 |
| IL4R | 0.6152 | 1.11 | 0.3383 | 1.23 | 0.2050 | 1.44 | 0.4637 | 1.37 | 0.4812 | 0.68 |
| KDM4A | 0.0594 | 1.20 | 0.0698 | 1.22 | 0.3602 | 1.27 | 0.8725 | 0.97 | 0.4712 | 1.15 |
| KRT19 | 0.0293 | 0.81 | 0.0275 | 0.77 | 0.1589 | 0.74 | 0.0176 | 0.59 | 0.8006 | 0.96 |
| KRT7 | 0.0491 | 1.15 | 0.5026 | 1.06 | 0.2201 | 0.84 | 0.0396 | 1.31 | 0.0008 | 1.55 |
| L1CAM | 0.0725 | 1.19 | 0.1297 | 1.19 | 0.0689 | 1.41 | 0.9284 | 0.98 | 0.3973 | 1.20 |
| LAMC1 | 0.0242 | 1.13 | 0.0003 | 1.26 | 0.1425 | 1.15 | 0.0819 | 1.22 | 0.0763 | 0.80 |
| LEPR | 0.4214 | 1.05 | 0.3180 | 1.07 | 0.6410 | 1.05 | 0.0425 | 1.24 | 0.6934 | 0.96 |
| MAGEB4 | 0.0347 | 1.17 | 0.0022 | 1.28 | 0.0001 | 1.60 | 0.3936 | 1.11 | 0.5817 | 0.91 |
| MAGED2 | 0.0517 | 1.17 | 0.0069 | 1.24 | 0.0281 | 1.28 | 0.4067 | 1.10 | 0.0867 | 0.49 |
| MIF | 0.0195 | 0.70 | 0.1566 | 0.79 | 0.5506 | 0.89 | 0.3626 | 0.73 | 0.0320 | 0.49 |
| MITF | 0.1663 | 1.08 | 0.4909 | 1.05 | 0.2028 | 0.86 | 0.0060 | 1.28 | 0.1509 | 1.18 |
| MUM1 | 0.0259 | 0.78 | 0.0074 | 0.69 | 0.0787 | 0.69 | 0.2835 | 0.81 | 0.4382 | 1.15 |
| NCOA1 | 0.0092 | 0.85 | 0.0363 | 0.87 | 0.0166 | 0.74 | 0.7861 | 0.97 | 0.0233 | 0.68 |
| PCDH1 | 0.6480 | 0.98 | 0.7551 | 0.98 | 0.3527 | 0.92 | 0.2217 | 1.13 | 0.5825 | 0.94 |
| PIAS3 | 0.0001 | 1.29 | 0.0002 | 1.29 | 0.3222 | 1.14 | 0.0035 | 1.32 | 0.6339 | 1.09 |
| PRKCI | 0.0476 | 1.16 | 0.0454 | 1.18 | 0.3070 | 1.15 | 0.1695 | 1.16 | 0.5245 | 1.14 |
| RELT | 0.3255 | 1.06 | 0.1089 | 1.11 | 0.0555 | 1.19 | 0.4862 | 0.88 | 0.2962 | 0.85 |
| RPLP0 | 0.0200 | 1.28 | 0.2950 | 1.14 | 0.3784 | 1.15 | 0.1426 | 1.40 | 0.0073 | 1.74 |
| RPLP2 | 0.0013 | 1.37 | 0.0073 | 1.35 | 0.3761 | 1.21 | 0.0025 | 1.75 | 0.1249 | 1.40 |
| SDCBP | 0.0106 | 0.66 | 0.0624 | 0.71 | 0.0275 | 0.52 | 0.8785 | 0.97 | 0.1147 | 0.55 |
| SPA17 | 0.9909 | 1.00 | 0.2617 | 1.07 | 0.1289 | 0.85 | 0.0165 | 1.25 | 0.0026 | 0.61 |
| SPTBN1 | 0.2718 | 1.08 | 0.1657 | 1.11 | 0.7897 | 1.03 | 0.4152 | 1.11 | 0.1780 | 0.75 |
| SUMO2 | 0.0215 | 0.80 | 0.0571 | 0.81 | 0.0019 | 0.46 | 0.2611 | 0.85 | 0.1995 | 0.76 |
| TMEM98 | 0.0389 | 0.87 | 0.0147 | 0.82 | 0.0612 | 0.78 | 0.9159 | 1.01 | 0.2175 | 1.17 |
| TP53 | 0.5806 | 1.06 | 0.3057 | 0.86 | 0.9439 | 0.99 | 0.1028 | 0.60 | 0.0863 | 1.21 |
| TPM2 | 0.0648 | 1.14 | 0.0007 | 1.33 | 0.0562 | 1.29 | 0.0085 | 1.38 | 0.0612 | 0.72 |
| UBE2Z | 0.0558 | 1.25 | 0.0136 | 1.35 | 0.1463 | 1.34 | 0.5452 | 1.11 | 0.4863 | 0.74 |
| UBTF | 0.6388 | 1.07 | 0.1961 | 1.21 | 0.8329 | 0.94 | 0.1965 | 1.23 | 0.0961 | 0.47 |

[0252] As single markers show very limited sensitivity to predict irAE, we explored association rules of markers exhibiting the highest mutual information for irAE. FIG. 16B shows a set of the best markers for irAE prediction. The sets include markers predicting an increased risk (IL4R, L1CAM, MITF, PIAS3, AP1S1, ATG4D, RPLP2) but also a reduced risk (MIF, NCOA1, FGFR1, SDCBP) to develop an irAE.

### Example 18: Development of Optimized Marker Panels for Colitis

[0253] As single markers show very limited sensitivity to predict an adverse event, we explored association rules of markers exhibiting the highest mutual information for colitis. FIG. 16a shows a set of the best 10 markers for colitis prediction. The sets include markers predicting an increased risk (RELT, CASP8, UBE2Z, IL4R, LAMC1, L1CAM, MITF) but also a reduced risk (SUMO2, GRP, MIF) to develop colitis.

### Example 19: Development of Optimized Marker Panels for irAE

[0254] Association rules mining was applied to identify optimized marker panels exhibiting the highest mutual information for irAE. FIG. 16b shows a set of the best markers for irAE prediction. The sets include markers predicting an increased risk (IL4R, L1CAM, MITF, PIAS3, AP1S1, ATG4D, RPLP2) but also a reduced risk (MIF, NCOA1, FGFR1, SDCBP) to develop an irAE.

### REFERENCES

[0255] Bei, R., Masuelli, L., Palumbo, C., Modesti, M., and Modesti, A. (2009). A common repertoire of autoantibodies is shared by cancer and autoimmune disease patients: Inflammation in their induction and impact on tumor growth. Cancer Lett. 281, 8-23.
[0256] Bresnick, A. R., Weber, D. J., and Zimmer, D. B. (2015). 5100 proteins in cancer. Nat. Rev. Cancer 15, 96-109.
[0257] Buchbinder, E. I., and Desai, A. (2016). CTLA-4 and PD-1 Pathways: Similarities, Differences, and Implications of Their Inhibition. Am. J. Clin. Oncol. 39, 98-106.
[0258] Budde, P., Zucht, H.-D., Vordenbaumen, S., Goehler, H., Fischer-Betz, R., Gamer, M., Marquart, K., Rengers, P., Richter, J., Lueking, A., et al. (2016). Multiparametric detection of autoantibodies in systemic lupus erythematosus. Lupus 25, 812-822.
[0259] Callahan, M. K., Postow, M. A., and Wolchok, J. D. (2013). Immunomodulatory therapy for melanoma: Ipilimumab and beyond. Clin. Dermatol. 31, 191-199.
[0260] Chiaruttini, G., Mele, S., Opzoomer, J., Crescioli, S., Ilieva, K. M., Lacy, K. E., and Karagiannis, S. N. (2017). B cells and the humoral response in melanoma: The overlooked players of the tumor microenvironment. OncoImmunology 6, e1294296.
[0261] Cuda, C. M., Pope, R. M., and Perlman, H. (2016). The inflammatory role of phagocyte apoptotic pathways in rheumatic diseases. Nat. Rev. Rheumatol. 12, 543-558.
[0262] Dai, N., Ji, F., Wright, J., Minichiello, L., Sadreyev, R., and Avruch, J. (2017). IGF2 mRNA binding protein-2 is a tumor promoter that drives cancer proliferation through its client mRNAs IGF2 and HMGA1. ELife 6.
[0263] Das, S. K., Bhutia, S. K., Kegelman, T. P., Peachy, L., Oyesanya, R. A., Dasgupta, S., Sokhi, U.K., Azab, B., Dash, R., Quinn, B. A., et al. (2012). MDA-9/syntenin: a positive gatekeeper of melanoma metastasis. Front. Biosci. Landmark Ed. 17, 1-15.
[0264] Eisenhauer, E. A., Therasse, P., Bogaerts, J., Schwartz, L. H., Sargent, D., Ford, R., Dancey, J., Arbuck, S., Gwyther, S., Mooney, M., et al. (2009). New response evaluation criteria in solid tumours: Revised RECIST guideline (version 1.1). Eur. J. Cancer 45, 228-247.
[0265] Ferrer, C. M., Sodi, V. L., and Reginato, M. J. (2016). 0-GlcNAcylation in Cancer Biology: Linking Metabolism and Signaling. J. Mol. Biol. 428, 3282-3294.
[0266] Garg, H., Suri, P., Gupta, J. C., Talwar, G. P., and Dubey, S. (2016). Survivin: a unique target for tumor therapy. Cancer Cell Int. 16.
[0267] Gulley, J. L., Madan, R. A., Tsang, K. Y., Jochems, C., Marté, J. L., Farsaci, B., Tucker, J. A., Hodge, J. W., Liewehr, D. J., Steinberg, S. M., et al. (2014). Immune Impact Induced by PROSTVAC (PSA-TRICOM), a Therapeutic Vaccine for Melanoma. Cancer Immunol. Res. 2, 133-141.
[0268] Hodi, F. S., Chesney, J., Pavlick, A. C., Robert, C., Grossmann, K. F., McDermott, D. F., Linette, G. P., Meyer, N., Giguere, J. K., Agarwala, S. S., et al. (2016). Combined nivolumab and ipilimumab versus ipilimumab alone in patients with advanced melanoma: 2-year overall survival outcomes in a multicentre, randomised, controlled, phase 2 trial. Lancet Oncol. 17, 1558-1568.
[0269] Houles, T., and Roux, P. P. (2017). Defining the role of the RSK isoforms in cancer. Semin. Cancer Biol.
[0270] Kindt, N., Journe, F., Laurent, G., and Saussez, S. (2016). Involvement of macrophage migration inhibitory factor in cancer and novel therapeutic targets. Oncol. Lett. 12, 2247-2253.
[0271] Larkin, J., Chiarion-Sileni, V., Gonzalez, R., Grob, J. J., Cowey, C. L., Lao, C. D., Schadendorf, D., Dummer, R., Smylie, M., Rutkowski, P., et al. (2015). Combined Nivolumab and Ipilimumab or Monotherapy in Untreated Melanoma. N. Engl. J. Med. 373, 23-34.
[0272] Luo, L. Y., and Hahn, W. C. (2015). Oncogenic Signaling Adaptor Proteins. J. Genet. Genomics 42, 521-529.
[0273] Manson, G., Norwood, J., Marabelle, A., Kohrt, H., and Houot, R. (2016). Biomarkers associated with checkpoint inhibitors. Ann. Oncol. 27, 1199-1206.
[0274] Moscat, J., Karin, M., and Diaz-Meco, M. T. (2016). p62 in Cancer: Signaling Adaptor Beyond Autophagy. Cell 167, 606-609.
[0275] Peng, S., Wang, K., Gu, Y., Chen, Y., Nan, X., Xing, J., Cui, Q., Chen, Y., Ge, Q., and Zhao, H. (2015). TRAF3IP3, a novel autophagy up-regulated gene, is involved in marginal zone B lymphocyte development and survival. Clin. Exp. Immunol. 182, 57-68.
[0276] Robin, X., Turck, N., Hainard, A., Tiberti, N., Lisacek, F., Sanchez, J.-C., and Müller, M. (2011). pROC: an open-source package for R and S+ to analyze and compare ROC curves. BMC Bioinformatics 12, 77.
[0277] Shi, Y., Feng, Y., Kang, J., Liu, C., Li, Z., Li, D., Cao, W., Qiu, J., Guo, Z., Bi, E., et al. (2007). Critical regulation of CD4+ T cell survival and autoimmunity by beta-arrestin 1. Nat. Immunol. 8, 817-824.
[0278] Smolinsky, B., Eichler, S. A., Buchmeier, S., Meier, J. C., and Schwarz, G. (2008). Splice-specific Functions of Gephyrin in Molybdenum Cofactor Biosynthesis. J. Biol. Chem. 283, 17370-17379.
[0279] Spain, L., Diem, S., and Larkin, J. (2016). Management of toxicities of immune checkpoint inhibitors. Cancer Treat. Rev. 44, 51-60.
[0280] Topalian, S. L., Taube, J. M., Anders, R. A., and Pardoll, D. M. (2016). Mechanism-driven biomarkers to guide immune checkpoint blockade in cancer therapy. Nat. Rev. Cancer 16, 275-287.
[0281] Tusher, V. G., Tibshirani, R., and Chu, G. (2001). Significance analysis of microarrays applied to the ionizing radiation response. Proc. Natl. Acad. Sci. U.S.A 98, 5116-5121.
[0282] Uehara, T., Kage-Nakadai, E., Yoshina, S., Imae, R., and Mitani, S. (2015). The Tumor Suppressor BCL7B Functions in the Wnt Signaling Pathway. PLoS Genet. 11, e1004921.

1. A method of identifying a tumor-associated antigen (TAA) for melanoma comprising:
a) selecting a group of patients with melanoma and a group of patients who are healthy,
b) assaying the level of an autoantibody to an antigen in a sample from a patient in the group,
c) comparing the level of the autoantibody from the patient in the group or the group of patients with melanoma to the level of the autoantibody in the group of healthy patients, and
d) determining that the antigen is a TAA for melanoma if the level of the autoantibody to the antigen is statistically different between the group of patients with melanoma versus the group of healthy patients.

2. The method of claim 1, wherein the antigen is an antigen encoded by a gene listed in Table 1 or Table 9, or wherein the antigen comprises an amino acid sequence of any one of SEQ ID NOS: 1-169.

3. The method of claim 1, wherein the TAA is encoded by a gene listed in Table 2.

4. The method of claim 1, wherein the assaying comprises b1) contacting a portion of serum from the patient with a sample of an antigen immobilized onto a solid support.

5. The method of claim 4, wherein the solid support is a bead.

6. The method of claim 5, wherein the bead is a microsphere.

7. A method of identifying a tumor-associated antigen (TAA) as a marker for melanoma overall survival (MOS) or melanoma disease control rate (MDCR) comprising:
a) selecting a first group of patients with melanoma who have statistically greater MOS or MDCR than a second group of patients with melanoma,
b) assaying the level of an autoantibody to the antigen in a sample from each of the patients in the first group,
c) comparing the level of the autoantibody to the antigen in each of the patients in the first group to the level of the autoantibody in each of the patients in the second group, and
d) determining that the antigen is a TAA marker for MOS or MDCR if the level of the autoantibody to the antigen is statistically different between the first group of patients and the second group of patients.

8. The method of claim 7, wherein the antigen is encoded by a gene listed in Table 3.

9. The method of claim 7, wherein the TAA marker for MOS or MDCR is encoded by a gene listed in Table 3.

10. The method of claim 7, wherein the assaying comprises b1) contacting a portion of serum from the patient with a sample of an antigen immobilized onto a solid support.

11. The method of claim 10, wherein the solid support is a bead.

12. The method of claim 11, wherein the bead is a microsphere.

13. A method of identifying and treating a melanoma patient susceptible to an immune-related adverse event (irAE) after treatment with a checkpoint inhibitor comprising:
a) determining the level of one or more antigens encoded by a gene listed in Table 4 having a positive value for SAM Fold.Change,
b) assaying the level of one or more antigens in a sample from a melanoma patient,
c) comparing the level of the one or more antigens with an average level of the one or more antigens for a group of patients with melanoma, and
d) administering the checkpoint inhibitor to the melanoma patient if (a) the level of the one or more antigens encoded by a gene listed in Table 4 having a value for SAM Fold.Change>1 in the patient is less than the average level of the one or more antigens encoded by a gene listed in Table 4 having a value for SAM Fold.Change>1 in the group of patients with melanoma or (b) the level of the one or more antigens encoded by a gene listed in Table 4 having a value for SAM Fold.Change<=1 in the patient is greater than the average level of the one or more antigens encoded by a gene listed in Table 4 having a value for SAM Fold.Change<=1 in the group of patients with melanoma.

14-22. (canceled)

23. A method of identifying and treating a melanoma patient with a checkpoint inhibitor comprising:
a) determining the level of one or more antigens encoded by a gene listed in Table 5 having a value for SAMR Fold.Change>1,
b) comparing the level of the one or more antigens with an average level of the one or more antigens for a group of patients with melanoma, and
c) administering the checkpoint inhibitor if the level of the one or more antigens in the patient is greater than the average level of the one or more antigens in the group of patients with melanoma.

24-32. (canceled)

33. A method of identifying and treating a melanoma patient with Ipilimumab comprising:
a) determining the level of one or more antigens encoded by a gene listed in Table 6 having a value for SAMR Fold.Change>1,
b) comparing the level of the one or more antigens with an average level of the one or more antigens for a group of patients with melanoma, and
c) administering the Ipilimumab if the level of the one or more antigens in the patient is less than the average level of the one or more antigens in the group of patients with melanoma.

34. A method of identifying and treating a melanoma patient with Ipilimumab comprising:
a) determining the level of one or more antigens encoded by a gene listed in Table 6 having a value for SAMR Fold.Change<=1,
b) comparing the level of the one or more antigens with an average level of the one or more antigens for a group of patients with melanoma, and
c) administering the Ipilimumab if the level of the one or more antigens in the patient is greater than the average level of the one or more antigens in the group of patients with melanoma.

35-39. (canceled)

40. A method of identifying and treating a melanoma patient with a CTLA-4 inhibitor comprising:
a) determining the level of one or more antigens encoded by a gene listed in Table 6 having a value for SAMR Fold.Change>1,
b) comparing the level of the one or more antigens with an average level of the one or more antigens for a group of patients with melanoma, and
c) administering the CTLA-4 inhibitor if the level of the one or more antigens in the patient is less than the average level of the one or more antigens in the group of patients with melanoma.

41. A method of identifying and treating a melanoma patient with a CTLA-4 inhibitor comprising:
a) determining the level of one or more antigens encoded by a gene listed in Table 6 having a value for SAMR Fold.Change<=1,
b) comparing the level of the one or more antigens with an average level of the one or more antigens for a group of patients with melanoma, and
c) administering the CTLA-4 inhibitor if the level of the one or more antigens in the patient is greater than the average level of the one or more antigens in the group of patients with melanoma.

42-46. (canceled)

47. A method of identifying and treating a melanoma patient with a PD-1/PD-L1 pathway inhibitor comprising:
a) determining the level of one or more antigens encoded by a gene listed in Table 7 having a value for SAMR Fold.Change>1,
b) comparing the level of the one or more antigens with an average level of the one or more antigens for a group of patients with melanoma, and
c) administering the PD-1/PD-L1 pathway inhibitor if the level of the one or more antigens in the patient is greater than the average level of the one or more antigens in the group of patients with melanoma.

48-54. (canceled)

55. A method of identifying and treating a melanoma patient with pembrolizumab comprising:
a) determining the level of one or more antigens encoded by a gene listed in Table 8 having a value for SAMR Fold.Change<=1,
b) comparing the level of the one or more antigens with an average level of the one or more antigens for a group of patients with melanoma, and
c) administering the pembrolizumab if the level of the one or more antigens in the patient is greater than the average level of the one or more antigens in the group of patients with melanoma.

56. A method of identifying and treating a melanoma patient with pembrolizumab comprising:
a) determining the level of one or more antigens encoded by a gene listed in Table 8 having a value for SAMR Fold.Change>1,
b) comparing the level of the one or more antigens with an average level of the one or more antigens for a group of patients with melanoma, and
c) administering the pembrolizumab if the level of the one or more antigens in the patient is less than the average level of the one or more antigens in the group of patients with melanoma.

57-61. (canceled)

62. A method of identifying an antigen predictive of development of an irAE or colitis in a patient with melanoma who is treated with a checkpoint inhibitor comprising:
a) selecting a first group of patients with melanoma who developed irAE or colitis after treatment with the checkpoint inhibitor,
b) assaying the level of an autoantibody to an antigen in a sample from a patient in the first group who developed irAE or colitis,
c) comparing the level of the autoantibody from the patient in the first group to the level of the autoantibody in a second group of patients with melanoma after treatment with the checkpoint inhibitor but did not develop irAE or colitis, and
d) determining that the antigen is predictive of development of an irAE or colitis if the level of the autoantibody to the antigen is statistically different between the first group of patients and the second group of patients.

63-66. (canceled)

67. A method of identifying an antigen predictive of development of colitis in a patient with melanoma who is treated with a checkpoint inhibitor comprising:
a) selecting a first group of patients with melanoma who developed colitis after treatment with the checkpoint inhibitor,
b) assaying the level of an autoantibody to an antigen in a sample from a patient in the first group who developed colitis,
c) comparing the level of the autoantibody from the patient in the first group to the level of the autoantibody in a second group of patients with melanoma after treatment with the checkpoint inhibitor but did not develop colitis, and
d) determining that the antigen is predictive of development of colitis if the level of the autoantibody to the antigen is statistically different between the first group of patients and the second group of patients.

68-78. (canceled)

79. A method of identifying an antigen predictive of development of an irAE in a patient with melanoma who is treated with a checkpoint inhibitor comprising:
a) selecting a first group of patients with melanoma who developed irAE after treatment with the checkpoint inhibitor,
b) assaying the level of an autoantibody to an antigen in a sample from a patient in the first group who developed the irAE,
c) comparing the level of the autoantibody from the patient in the first group to the level of the autoantibody in a second group of patients with melanoma after treatment with the checkpoint inhibitor but did not develop the irAE, and
d) determining that the antigen is predictive of development of the irAE if the level of the autoantibody to the antigen is statistically different between the first group of patients and the second group of patients.

80-85. (canceled)

The application's sequence listing, which the Patent Office published only in electronic form, follows.

SEQUENCE LISTING (169 sequences)

SEQ ID NO: 1 - protein, 601 aa, Homo sapiens
MPVGLPREPERHVRVKQRTSVLNMLRRLDKIRFRGHKRDDFLDLAESPNASDTECSDEIPLKVPRTSPRDSEELRDPAGPGTLIMATGVQDFNRTEFDRLNEIKGHLEIALLEKHFLQEELRKLREETNAEMLRQELDRERQRRMELEQKVQEVLKARTEEQMAQQPPKGQAQASNGAERRSQGLSSRLQKWFYERFGEYVEDFRFQPEENTVETEEPLSARRLTENMRRLKRGAKPVTNFVKNLSALSDWYSVYTSAIAFTVYMNAVWHGWAIPLFLFLAILRLSLNYLIARGWRIQWSIVPEVSEPVEPPKEDLTVSEKFQLVLDVAQKAQNLFGKMADILEKIKNLFMWVQPEITQKLYVALWAAFLASCFFPYRLVGLAVGLYAGIKFFLIDFIFKRCPRLRAKYDTPYIIWRSLPTDPQLKERSSAAVSRRLQTTSSRSYVPSAPAGLGKEEDAGRFHSTKKGNFHEIFNLTENERPLAVCENGWRCCLINRDRKMPTDYIRNGVLYVTENYLCFESSKSGSSKRNKVIKLVDITDIQKYKVLSVLPGSGMGIAVSTPSTQKPLVFGAMVHRDEAFETILSQYIKITSAAASGGDS

SEQ ID NO: 2 - protein, 313 aa, Homo sapiens
MSDLLLLGLIGGLTLLLLLTLLAFAGYSGLLAGVEVSAGSPPIRNVTVAYKFHMGLYGETGRLFTESCSISPKLRSIAVYYDNPHMVPPDKCRCAVGSILSEGEESPSPELIDLYQKFGFKVFSFPAPSHVVTATFPYTTILSIWLATRRVHPALDTYIKERKLCAYPRLEIYQEDQIHFMCPLARQGDFYVPEMKETEWKWRGLVEAIDTQVDGTGADTMSDTSSVSLEVSPGSRETSAATLSPGASSRGWDDGDTRSEHSYSESGASGSSFEELDLEGEGPLGESRLDPGTEPLGTTKWLWEPTAPEKGKE

SEQ ID NO: 3 - protein, 519 aa, Homo sapiens
MDAVLEPFPADRLFPGSSFLDLGDLNESDFLNNAHFPEHLDHFTENMEDFSNDLFSSFFDDPVLDEKSPLLDMELDSPTPGIQAEHSYSLSGDSAPQSPLVPIKMEDTTQDAEHGAWALGHKLCSIMVKQEQSPELPVDPLAAPSAMAAAAAMATTPLLGLSPLSRLPIPHQAPGEMTQLPVIKAEPLEVNQFLKVTPEDLVQMPPTPPSSHGSDSDGSQSPRSLPPSSPVRPMARSSTAISTSPLLTAPHKLQGTSGPLLLTEEEKRTLIAEGYPIPTKLPLTKAEEKALKRVRRKIKNKISAQESRRKKKEYVECLEKKVETFTSENNELWKKVETLENANRTLLQQLQKLQTLVTNKISRPYKMAATQTGTCLMVAALCFVLVLGSLVPCLPEFSSGSQTVKEDPLAADGVYTASQMPSRSLLFYDDGAGLWEDGRSTLLPMEPPDGWEINPGGPAEQRPRDHLQHDHLDSTHETTKYLSEAWPKDGGNGTSPDFSHSKEWFHDRDLGPNTTIKLS

SEQ ID NO: 4 - protein, 620 aa, Homo sapiens
MAAVRGLRVSVKAEAPAGPALGLPSPEAESGVDRGEPEPMEVEEGELEIVPVRRSLKELIPDTSRRYENKAGSFITGIDVTSKEAIEKKEQRAKRFHFRSEVNLAQRNVALDRDMMKKAIPKVRLETIYICGVDEMSTQDVFSYFKEYPPAHIEWLDDTSCNVVWLDEMTATRALINMSSLPAQDKIRSRDASEDKSAEKRKKDKQEDSSDDDEAEEGEVEDENSSDVELDTLSQVEEESLLRNDLRPANKLAKGNRLFMRFATKDDKKELGAARRSQYYMKYGNPNYGGMKGILSNSWKRRYHSRRIQRDVIKKRALIGDDVGLTSYKHRHSGLVNVPEEPIEEEEEEEEEEEEEEEEDQDMDADDRVVVEYHEELPALKQPRERSASRRSSASSSDSDEMDYDLELKMISTPSPKKSMKMTMYADEVESQLKNIRNSMRADSVSSSNIKNRIGNKLPPEKFADVRHLLDEKRQHSRPRPPVSSTKSDIRQRLGKRPHSPEKAFSSNPVVRREPSSDVHSRLGVPRQDSKGLYADTREKKSGNLWTRLGSAPKTKEKNTKKVDHRAPGAEEDDSELQRAWGALIKEKEQSRQKKSRLDNLPSLQIEVSRESSSGSEAES

SEQ ID NO: 5 - protein, 508 aa, Homo sapiens
MGSCCSCPDKDTVPDNHRNKFKVINVDDDGNELGSGIMELTDTELILYTRKRDSVKWHYLCLRRYGYDSNLFSFESGRRCQTGQGIFAFKCARAEELFNMLQEIMQNNSINVVEEPVVERNNHQTELEVPRTPRTPTTPGFAAQNLPNGYPRYPSFGDASSHPSSRHPSVGSARLPSVGEESTHPLLVAEEQVHTYVNTTGVQEERKNRTSVHVPLEARVSNAESSTPKEEPSSIEDRDPQILLEPEGVKFVLGPTPVQKQLMEKEKLEQLGRDQVSGSGANNTEWDTGYDSDERRDAPSVNKLVYENINGLSIPSASGVRRGRLTSTSTSDTQNINNSAQRRTALLNYENLPSLPPVWEARKLSRDEDDNLGPKTPSLNGYHNNLDPMHNYVNTENVTVPASAHKIEYSRRRDCTPTVFNFDIRRPSLEHRQLNYIQVDLEGGSDSDNPQTPKTPTTPLPQTPTRRTELYAVIDIERTAAMSNLQKALPRDDGTSRKTRHNSTDLPM

SEQ ID NO: 6 - protein, 101 aa, Homo sapiens
MWGKSVGIMLTELEKALNSIIDVYHKYSLIKGNFHAVYRDDLKKLLETECPQYIRKKGADVWFKELDINTDGAVNFQEFLILVIKMGVAAHKKSHEESHKE

SEQ ID NO: 7 - protein, 551 aa, Homo sapiens
MISPDPRPSPGLARWAESYEAKCERRQEIRESRRCRPNVTTCRQVGKTLRIQQREQLQRARLQQFFRRRNLELEEKGKAQHPQAREQGPSRRPGQVTVLKEPLSCARRISSPREQVTGTSSEVFPAQHPPPSGICRDLSDHLSSQAGGLPPQDTPIKKPPKHHRGTQTKAEGPTIKNDASQQTNYGVAVLDKEIIQLSDYLKEALQRELVLKQKMVILQDLLSTLIQASDSSWKGQLNEDKLKGKLRSLENQLYTCTQKYSPWGMKKVLLEMEDQKNSYEQKAKESLQKVLEEKMNAEQQLQSTQRSLALAEQKCEEWRSQYEALKEDWRTLGTQHRELESQLHVLQSKLQGADSRDLQMNQALRFLENEHQQLQAKIECLQGDRDLCSLDTQDLQDQLKRSEAEKLTLVTRVQQLQGLLQNQSLQLQEQEKLLTKKDQALPVWSPKSFPNEVEPEGTGKEKDWDLRDQLQKKTLQLQAKEKECRELHSELDNLSDEYLSCLRKLQHCREELNQSQQLPPRRQCGRWLPVLMVVIAAALAVFLANKDNLMI

SEQ ID NO: 8 - protein, 492 aa, Homo sapiens
MEPEAPDSRKRPLETPPEVVCTKRSNTGEEGEYFLKVLIPSYAAGSIIGKGGQTIVQLQKETGATIKLSKSKDFYPGTTERVCLVQGTAEALNAVHSFIAEKVREIPQAMTKPEVVNILQPQTTMNPDRAKQAKLIVPNSTAGLIIGKGGATVKAVMEQSGAWVQLSQKPEGINLQERVVTVSGEPEQVHKAVSAIVQKVQEDPQSSSCLNISYANVAGPVANSNPTGSPYASPADVLPAAAAASAAAASGLLGPAGLAGVGAFPAALPAFSGTDLLAISTALNTLASYGYNTNSLGLGLNSAAASGVLAAVAAGANPAAAAAANLLASYAGEAGAGPAGGAAPPPPPPPGALGSFALAAAANGYLGAGAGGGAGGGGGPLVAAAAAAGAAGGFLTAEKLAAESAKELVEIAVPENLVGAILGKGGKTLVEYQELTGARIQISKKGEFLPGTRNRRVTITGSPAATQAAQYLISQRVTYEQGVRASNPQKVG

SEQ ID NO: 9 - protein, 83 aa, Homo sapiens
MSFFQLLMKRKELIPLVVFMTVAAGGASSFAVYSLWKTDVILDRKKNPEPWETVDPTVPQKLITINQQWKPIEELQNVQRVTK

SEQ ID NO: 10 - protein, 115 aa, Homo sapiens
MPMFIVNTNVPRASVPDGFLSELTQQLAQATGKPPQYIAVHVVPDQLMAFGGSSEPCALCSLHSIGKIGGAQNRSYSKLLCGLLAERLRISPDRVYINYYDMNAANVGWNNSTFA

SEQ ID NO: 11 - protein, 180 aa, Homo sapiens
MQAEGRGTGGSTGDADGPGGPGIPDGPGGNAGGPGEAGATGGRGPRGAGAARASGPGGGAPRGPHGGAASGLNGCCRCGARGPESRLLEFYLAMPFATPMEAELARRSLAQDAPPLPVPGVLLKEFTVSGNILTIRLTAADHRQLQLSISSCLQQLSLLMWITQCFLPVFLAQPPSGQRR

SEQ ID NO: 12 - protein, 477 aa, Homo sapiens
MANMQGLVERLERAVSRLESLSAESHRPPGNCGEVNGVIAGVAPSVEAFDKLMDSMVAEFLKNSRILAGDVETHAEMVHSAFQAQRAFLLMASQYQQPHENDVAALLKPISEKIQEIQTFRERNRGSNMFNHLSAVSESIPALGWIAVSPKPGPYVKEMNDAATFYTNRVLKDYKHSDLRHVDWVKSYLNIWSELQAYIKEHHTTGLTWSKTGPVASTVSAFSVLSSGPGLPPPPPPLPPPGPPPLFENEGKKEESSPSRSALFAQLNQGEAITKGLRHVTDDQKTYKNPSLRAQGGQTQSPTKSHTPSPTSPKSYPSQKHAPVLELEGKKWRVEYQEDRNDLVISETELKQVAYIFKCEKSTIQIKGKVNSIIIDNCKKLGLVFDNVVGIVEVINSQDIQIQVMGRVPTISINKTEGCHIYLSEDALDCEIVSAKSSEMNILIPQDGDYREFPIPEQFKTAWDGSKLITEPAEIMA

SEQ ID NO: 13 - protein, 391 aa, Homo sapiens
MSGPVPSRARVYTDVNTHRPREYWDYESHVVEWGNQDDYQLVRKLGRGKYSEVFEAINITNNEKVVVKILKPVKKKKIKREIKILENLRGGPNIITLADIVKDPVSRTPALVFEHVNNTDFKQLYQTLTDYDIRFYMYEILKALDYCHSMGIMHRDVKPHNVMIDHEHRKLRLIDWGLAEFYHPGQEYNVRVASRYFKGPELLVDYQMYDYSLDMWSLGCMLASMIFRKEPFFHGHDNYDQLVRIAKVLGTEDLYDYIDKYNIELDPRFNDILGRHSRKRWERFVHSENQHLVSPEALDFLDKLLRYDHQSRLTAREAMEHPYFYTVVKDQARMGSSSMPGGSTPVSSANMMSGISSVPTPSPLGPLAGSPVIAAANPLGMPVPAAAGAQQ

SEQ ID NO: 14 - protein, 596 aa, Homo sapiens
MMNKLYIGNLSPAVTADDLRQLFGDRKLPLAGQVLLKSGYAFVDYPDQNWAIRAIETLSGAGKFRFETSLLTCSGRCWMDFWLNMGQWRMWNKPKEVIQKNTQSSDVCNKVNTDTETAVVNVTYATREEAKIAMEKLSGHQFENYSFKISYIPDEEVSSPSPPQRAQRGDHSSREQGHAPGGTSQARQIDFPLRILVPTQFVGAIIGKEGLTIKNITKQTQSRVDIHRKENSGAAEKPVTIHATPEGTSEACRMILEIMQKEADETKLAEEIPLKILAHNGLVGRLIGKEGRNLKKIEHETGTKITISSLQDLSIYNPERTITVKGTVEACASAEIEIMKKLREAFENDMLAVNQQANLIPGLNLSALGIFSTGLSVLSPPAGPRGAPPAAPYHPFTTHSGYFSSLYPHHQFGPFPHHHSYPEQEIVNLFIPTQAVGAIIGKKGAHIKQLARFAGASIKIAPAEGPDVSERMVIITGPPEAQFKAQGRIFGKLKEENFFNPKEEVKLEAHIRVPSSTAGRVIGKGGKTVNELQNLTSAEVIVPRDQTPDENEEVIVRIIGHFFASQTAQRKIREIVQQVKQQEQKYPQGVASQRSK

SEQ ID NO: 15 - protein, 825 aa, Homo sapiens
MATEGMILTNHDHQIRVGVLTVSDSCFRNLAEDRSGINLKDLVQDPSLLGGTISAYKIVPDEIEEIKETLIDWCDEKELNLILTTGGTGFAPRDVTPEKFPTFPFCGLQKGATKEVIEREAPGMALAMLMGSLNVTPLGMLSRPVCGIRGKTLIINLPGSKKGSQECFQFILPALPHAIDLLRDAIVKVKEVHDELEDLPSPPPPLSPPPTTSPHKQTEDKGVQCEEEEEEKKDSGVASTEDSSSSHITAAAIAAKKHPFYTSPAVVMAHGEQPIPGLINYSHHSTDERIPDSIISRGVQVLPRDTASLSTTPSESPRAQATSRLSTASCPTPKQIRRPDESKGVASRVGSLKLHRKLEELRDHLEGNVKGYSLRVNVQSRCSSKENILRASHSAVDITKVARRHRMSPFPLTSMDKAFITVLEMTPVLGTEIINYRDGMGRVLAQDVYAKDNLPPFPASVKDGYAVRAADGPGDRFIIGESQAGEQPTQTVMPGQVMRVTTGAPIPCGADAVVQVEDTELIRESDDGTEELEVRILVQARPGQDIRPIGHDIKRGECVLAKGTHMGPSEIGLLATVGVTEVEVNKFPVVAVMSTGNELLNPEDDLLPGKIRDSNRSTLLATIQEHGYPTINLGIVGDNPDDLLNALNEGISRADVIITSGGVSMGEKDYLKQVLDIDLHAQIHFGRVFMKPGLPTTFATLDIDGVRKIIFALPGNPVSAVVTCNLFVVPALRKMQGILDPRPTIIKARLSCDVKLDPRPEYHRCILTWHHQEPLPWAQSTGNQMSSRLMSMRSANGLLMLPPKTEQYVELHKGEVVDVMVIGRL

SEQ ID NO: 16 - protein, 298 aa, Homo sapiens
MSLYPSLEDLKVDKVIQAQTAFSANPANPAILSEASAPIPHDGNLYPRLYPELSQYMGLSLNEEEIRANVAVVSGAPLQGQLVARPSSINYMVAPVTGNDVGIRRAEIKQGIREVILCKDQDGKIGLRLKSIDNGIFVQLVQANSPASLVGLRFGDQVLQINGENCAGWSSDKAHKVLKQAFGEKITMTIRDRPFERTITMHKDSTGHVGFIFKNGKITSIVKDSSAARNGLLTEHNICEINGQNVIGLKDSQIADILSTSGTVVTITIMPAFIFEHIIKRMAPSIMKSLMDHTIPEV

SEQ ID NO: 17 - protein, 641 aa, Homo sapiens
MAKAAAIGIDLGTTYSCVGVFQHGKVEIIANDQGNRTTPSYVAFTDTERLIGDAAKNQVALNPQNTVFDAKRLIGRKFGDPVVQSDMKHWPFQVINDGDKPKVQVSYKGETKAFYPEEISSMVLTKMKEIAEAYLGYPVTNAVITVPAYFNDSQRQATKDAGVIAGLNVLRIINEPTAAAIAYGLDRTGKGERNVLIFDLGGGTFDVSILTIDDGIFEVKATAGDTHLGGEDFDNRLVNHFVEEFKRKHKKDISQNKRAVRRLRTACERAKRTLSSSTQASLEIDSLFEGIDFYTSITRARFEELCSDLFRSTLEPVEKALRDAKLDKAQIHDLVLVGGSTRIPKVQKLLQDFFNGRDLNKSINPDEAVAYGAAVQAAILMGDKSENVQDLLLLDVAPLSLGLETAGGVMTALIKRNSTIPTKQTQIFTTYSDNQPGVLIQVYEGERAMTKDNNLLGRFELSGIPPAPRGVPQIEVTFDIDANGILNVTATDKSTGKANKITITNDKGRLSKEEIERMVQEAEKYKAEDEVQRERVSAKNALESYAFNMKSAVEDEGLKGKISEADKKKVLDKCQEVISWLDANTLAEKDEFEHKRKELEQVCNPIISGLYQGAGGPGPGGFGAQGPKGGSGSGPTIEEVD

SEQ ID NO: 18 - protein, 2328 aa, Homo sapiens
MTSATEFENVGNQPPYSRINARWDAPDDELDNDNSSARLFERSRIKALADEREVVQKKTFTKWVNSHLARVSCRITDLYKDLRDGRMLIKLLEVLSGEMLPKPTKGKMRIHCLENVDKALQFLKEQRVHLENMGSHDIVDGNHRLVLGLIWTIILRFQIQDIVVQTQEGRETRSAKDALLLWCQMKTAGYPHVNVTNFTSSWKDGLAFNALIHKHRPDLIDFDKLKDSNARHNLEHAFNVAERQLGIIPLLDPEDVFTENPDEKSIITYVVAFYHYFSKMKVLAVEGKRVGKVIDHAIETEKMIEKYSGLASDLLTWIEQTITVLNSRKFANSLTGVQQQLQAFSTYRTVEKPPKFQEKGNLEVLLFTIQSRMRANNQKVYTPHDGKLVSDINRAWESLEEAEYRRELALRNELIRQEKLEQLARRFDRKAAMRETWLSENQRLVAQDNFGYDLAAVEAAKKKHEAIETDTAAYEERVRALEDLAQELEKENYHDQKRITARKDNILRLWSYLQELLQSRRQRLETTLALQKLFQDMLHSIDWMDEIKAHLLSAEFGKHLLEVEDLLQKHKLMEADIAIQGDKVKAITAATLKFTEGKGYQPCDPQVIQDRISHLEQCFEELSNMAAGRKAQLEQSKRLWKFFWEMDEAESWIKEKEQIYSSLDYGKDLTSVLILQRKHKAFEDELRGLDAHLEQIFQEAHGMVARKQFGHPQIEARIKEVSAQWDQLKDLAAFCKKNLQDAENFFQFQGDADDLKAWLQDAHRLLSGEDVGQDEGATRALGKKHKDFLEELEESRGVMEHLEQQAQGFPEEFRDSPDVTHRLQALRELYQQVVAQADLRQQRLQEALDLYTVFGETDACELWMGEKEKWLAEMEMPDTLEDLEVVQHRFDILDQEMKTLMTQIDGVNLAANSLVESGHPRSREVKQYQDHLNTRWQAFQTLVSERREAVDSALRVHNYCVDCEETSKWITDKTKVVESTKDLGRDLAGIIAIQRKLSGLERDVAAIQARVDALERESQQLMDSHPEQKEDIGQRQKHLEELWQGLQQSLQGQEDLLGEVSQLQAFLQDLDDFQAWLSITQKAVASEDMPESLPEAEQLLQQHAGIKDEIDGHQDSYQRVKESGEKVIQGQTDPEYLLLGQRLEGLDTGWNALGRMWESRSHTLAQCLGFQEFQKDAKQAEAILSNQEYTLAHLEPPDSLEAAEAGIRKFEDFLGSMENNRDKVLSPVDSGNKLVAEGNLYSDKIKEKVQLIEDRHRKNNEKAQEASVLLRDNLELQNFLQNCQELTLWINDKLLTSQDVSYDEARNLHNKWLKHQAFVAELASHEGWLENIDAEGKQLMDEKPQFTALVSQKLEALHRLWDELQATTKEKTQHLSAARSSDLRLQTHADLNKWISAMEDQLRSDDPGKDLTSVNRMLAKLKRVEDQVNVRKEELGELFAQVPSMGEEGGDADLSIEKRFLDLLEPLGRRKKQLESSRAKLQISRDLEDETLWVEERLPLAQSADYGTNLQTVQLFMKKNQTLQNEILGHTPRVEDVLQRGQQLVEAAEIDCQDLEERLGHLQSSWDRLREAAAGRLQRLRDANEAQQYYLDADEAEAWIGEQELYVISDEIPKDEEGAIVMLKRHLRQQRAVEDYGRNIKQLASRAQGLLSAGHPEGEQIIRLQGQVDKHYAGLKDVAEERKRKLENMYHLFQLKRETDDLEQWISEKELVASSPEMGQDFDHVTLLRDKFRDFARETGAIGQERVDNVNAFIERLIDAGHSEAATIAEWKDGLNEMWADLLELIDTRMQLLAASYDLHRYFYTGAEILGLIDEKHRELPEDVGLDASTAESFHRVHTAFERELHLLGVQVQQFQDVATRLQTAYAGEKAEAIQNKEQEVSAAWQALLDACAGRRTQLVDTADKFRFFSMARDLLSWMESIIRQIETQERPRDVSSVELLMKYHQGINAEIETRSKNFSACLELGESLLQRQHQASEEIREKLQQVMSRRKEMNEKWEARWERLRMLLEVCQFSRDASVAEAWLIAQEPYLASGDFGHTVDSVEKLIKRHEAFEKSTASWAERFAALEKPTTLELKERQIAERPAEETGPQEEEGETAGEAPVSHHAATERTSPGEEEGTWPQNLQQPPPPGQHKDGQKSTGDERPTTEPLFKVLDTPLSEGDEPATLPAPRDHGQSVQMEGYLGRKHDLEGPNKKASNRSWNNLYCVLRNSELTFYKDAKNLALGMPYHGEEPLALRHAICEIAANYKKKKHVFKLRLSNGSEWLFHGKDEEEMLSWLQGVSTAINESQSIRVKAQSLPLPSLSGPDASLGKKDKEKRFSFFPKKK

SEQ ID NO: 19 - protein, 280 aa, Homo sapiens
MPADIMEKNSSSPVAATPASVNTTPDKPKTASEHRKSSKPIMEKRRRARINESLSQLKTLILDALKKDSSRHSKLEKADILEMTVKHLRNLQRAQMTAALSTDPSVLGKYRAGFSECMNEVTRFLSTCEGVNTEVRTRLLGHLANCMTQINAMTYPGQPHPALQAPPPPPPGPGGPQHAPFAPPPPLVPIPGGAAPPPGGAPCKLGSQAGEAAKVFGGFQVVPAPDGQFAFLIPNGAFAHSGPVIPVYTSNSGTSVGPNAVSPSSGPSLTADSMWRPWRN

SEQ ID NO: 20 - protein, 477 aa, Homo sapiens
MKSLPILLLLCVAVCSAYPLDGAARGEDTSMNLVQKYLENYYDLKKDVKQFVRRKDSGPVVKKIREMQKFLGLEVTGKLDSDTLEVMRKPRCGVPDVGHFRTFPGIPKWRKTHLTYRIVNYTPDLPKDAVDSAVEKALKVWEEVTPLTFSRLYEGEADIMISFAVREHGDFYPFDGPGNVLAHAYAPGPGINGDAHFDDDEQWTKDTTGTNLFLVAAHEIGHSLGLFHSANTEALMYPLYHSLTDLTRFRLSQDDINGIQSLYGPPPDSPETPLVPTEPVPPEPGTPANCDPALSFDAVSTLRGEILIFKDRHFWRKSLRKLEPELHLISSFWPSLPSGVDAAYEVTSKDLVFIFKGNQFWAIRGNEVRAGYPRGIHTLGFPPTVRKIDAAISDKEKNKTYFFVEDKYWRFDEKRNSMEPGFPKQIAEDFPGIDSKIDAVFEEFGFFYFFTGSSQLEFDPNAKKVTHTLKSNSWLNC

SEQ ID NO: 21 - protein, 736 aa, Homo sapiens
MKEMSANTVLDSQRQQKHYGITSPISLASPKEIDHIYTQKLIDAMKPFGVFEDEEELNHRLVVLGKLNNLVKEWISDVSESKNLPPSVVATVGGKIFTFGSYRLGVHTKGADIDALCVAPRHVERSDFFQSFFEKLKHQDGIRNLRAVEDAFVPVIKFEFDGIEIDLVFARLAIQTISDNLDLRDDSRLRSLDIRCIRSLNGCRVTDEILHLVPNKETFRLTLRAVKLWAKRRGIYSNMLGFLGGVSWAMLVARTCQLYPNAAASTLVHKFFLVFSKWEWPNPVLLKQPEESNLNLPVWDPRVNPSDRYHLMPIITPAYPQQNSTYNVSTSTRTVMVEEFKQGLAVTDEILQGKSDWSKLLEPPNFFQKYRHYIVLTASASTEENHLEWVGLVESKIRVLVGNLERNEFITLAHVNPQSFPGNKEHHKDNNYVSMWFLGIIFRRVENAESVNIDLTYDIQSFTDTVYRQANNINMLKEGMKIEATHVKKKQLHHYLPAEILQKKKKQSLSDVNRSSGGLQSKRLSLDSSCLDSSRDTDNGTPFNSPASKSDSPSVGETERNSAEPAAVIVEKPLSVPPAQGLSIPVIGAKVDSTVKTVSPPTVCTIPTVVGRNVIPRITTPHNPAQGQPHLNGMSNITKTVTPKRSHSPSIDGTPKRLKDVEKFIRLESTFKDPRTAEERKRKSVDAIGGESMPIPTIDTSRKKRLPSKELPDSSSPVPANNIRVIKNSIRLTLNR

SEQ ID NO: 22 - protein, 119 aa, Homo sapiens
MKLVRFLMKLSHETVTIELKNGTQVHGTITGVDVSMNTHLKAVKMTLKNREPVQLETLSIRGNNIRYFILPDSLPLDTLLVDVEPKVKSKKREAVAGRGRGRGRGRGRGRGRGRGGPRR

SEQ ID NO: 23 - protein, 408 aa, Homo sapiens
MAENGDNEKMAALEAKICHQIEYYFGDFNLPRDKFLKEQIKLDEGWVPLEIMIKFNRLNRLTTDFNVIVEALSKSKAELMEISEDKTKIRRSPSKPLPEVTDEYKNDVKNRSVYIKGFPTDATLDDIKEWLEDKGQVLNIQMRRTLHKAFKGSIFVVFDSIESAKKFVETPGQKYKETDLLILFKDDYFAKKNEERKQNKVEAKLRAKQEQEAKQKLEEDAEMKSLEEKIGCLLKFSGDLDDQTCREDLHILFSNHGEIKWIDFVRGAKEGIILFKEKAKEALGKAKDANNGNLQLRNKEVTWEVLEGEVEKEALKKIIEDQQESLNKWKSKGRRFKGKGKGNKAAQPGSGKGKVQFQGKKTKFASDDEHDEHDENGATGPVKRAREETDKEEPASKQQKTENGAGDQ

SEQ ID NO: 24 - protein, 732 aa, Homo sapiens
MVRSGNKAAVVLCMDVGFTMSNSIPGIESPFEQAKKVITMFVQRQVFAENKDEIALVLFGTDGTDNPLSGGDQYQNITVHRHLMLPDFDLLEDIESKIQPGSQQADFLDALIVSMDVIQHETIGKKFEKRHIEIFTDLSSRFSKSQLDIIIHSLKKCDISLQFFLPFSLGKEDGSGDRGDGPFRLGGHGPSFPLKGITEQQKEGLEIVKMVMISLEGEDGLDEIYSFSESLRKLCVFKKIERHSIHWPCRLTIGSNLSIRIAAYKSILQERVKKTWTVVDAKTLKKEDIQKETVYCLNDDDETEVLKEDIIQGFRYGSDIVPFSKVDEEQMKYKSEGKCFSVLGFCKSSQVQRRFFMGNQVLKVFAARDDEAAAVALSSLIHALDDLDMVAIVRYAYDKRANPQVGVAFPHIKHNYECLVYVQLPFMEDLRQYMFSSLKNSKKYAPTEAQLNAVDALIDSMSLAKKDEKTDTLEDLFPTTKIPNPRFQRLFQCLLHRALHPREPLPPIQQHIWNMLNPPAEVTTKSQIPLSKIKTLFPLIEAKKKDQVTAQEIFQDNHEDGPTAKKLKTEQGGAHFSVSSLAEGSVTSVGSVNPAENFRVLVKQKKASFEEASNQLINHIEQFLDTNETPYFMKSIDCIRAFREEAIKFSEEQRFNNFLKALQEKVEIKQLNHFWEIVVQDGITLITKEEASGSSVTAEEAKKFLAPKDKPSGDTAAVFEEGGDVDDLLDMI

SEQ ID NO: 25 - protein, 609 aa, Homo sapiens
MSGWESYYKTEGDEEAEEEQEENLEASGDYKYSGRDSLIFLVDASKAMFESQSEDELTPFDMSIQCIQSVYISKIISSDRDLLAVVFYGTEKDKNSVNFKNIYVLQELDNPGAKRILELDQFKGQQGQKRFQDMMGHGSDYSLSEVLWVCANLFSDVQFKMSHKRIMLFTNEDNPHGNDSAKASRARTKAGDLRDTGIFLDLMHLKKPGGFDISLFYRDIISIAEDEDLRVHFEESSKLEDLLRKVRAKETRKRALSRLKLKLNKDIVISVGIYNLVQKALKPPPIKLYRETNEPVKTKTRTFNTSTGGLLLPSDTKRSQIYGSRQIILEKEETEELKRFDDPGLMLMGFKPLVLLKKHHYLRPSLFVYPEESLVIGSSTLFSALLIKCLEKEVAALCRYTPRRNIPPYFVALVPQEEELDDQKIQVTPPGFQLVFLPFADDKRKMPFTEKIMATPEQVGKMKAIVEKLRFTYRSDSFENPVLQQHFRNLEALALDLMEPEQAVDLTLPKVEAMNKRLGSLVDEFKELVYPPDYNPEGKVTKRKHDNEGSGSKRPKVEYSEEELKTHISKGTLGKFTVPMLKEACRAYGLKSGLKKQELLEALTKHFQD

SEQ ID NO: 26 - protein, 705 aa, Homo sapiens
MQLGEQLLVSSVNLPGAHFYPLESARGGSGGSAGHLPSAAPSPQKLDLDKASKKFSGSLSCEAVSGEPAAASAGAPAAMLSDTDAGDAFASAAAVAKPGPPDGRKGSPCGEEELPSAAAAAAAAAAAAAATARYSMDSLSSERYYLQSPGPQGSELAAPCSLFPYQAAAGAPHGPVYPAPNGARYPYGSMLPPGGFPAAVCPPGRAQFGPGAGAGSGAGGSSGGGGGPGTYQYSQGAPLYGPYPGAAAAGSCGGLGGLGVPGSGFRAHVYLCNRPLWLKFHRHQTEMIITKQGRRMFPFLSFNINGLNPTAHYNVFVEVVLADPNHWRFQGGKWVTCGKADNNMQGNKMYVHPESPNTGSHWMRQEISFGKLKLTNNKGANNNNTQMIVLQSLHKYQPRLHIVEVTEDGVEDLNEPSKTQTFTFSETQFIAVTAYQNTDITQLKIDHNPFAKGFRDNYDSMYTASENDRLTPSPTDSPRSHQIVPGGRYGVQSFFPEPFVNTLPQARYYNGERTVPQTNGLLSPQQSEEVANPPQRWLVTPVQQPGTNKLDISSYESEYTSSTLLPYGIKSLPLQTSHALGYYPDPTFPAMAGWGGRGSYQRKMAAGLPWTSRTSPTVFSEDQLSKEKVKEEIGSSWIETPPSIKSLDSNDSGVYTSACKRRRLSPSNSSNENSPSIKCEDINAEEYSKDTSKGMGGYYAFYTTP

SEQ ID NO: 27 - protein, 1342 aa, Homo sapiens
MRANDALQVLGLLFSLARGSEVGNSQAVCPGTLNGLSVTGDAENQYQTLYKLYERCEVVMGNLEIVLTGHNADLSFLQWIREVTGYVLVAMNEFSTLPLPNLRVVRGTQVYDGKFAIFVMLNYNTNSSHALRQLRLTQLTEILSGGVYIEKNDKLCHMDTIDWRDIVRDRDAEIVVKDNGRSCPPCHEVCKGRCWGPGSEDCQTLTKTICAPQCNGHCFGPNPNQCCHDECAGGCSGPQDTDCFACRHFNDSGACVPRCPQPLVYNKLTFQLEPNPHTKYQYGGVCVASCPHNFVVDQTSCVRACPPDKMEVDKNGLKMCEPCGGLCPKACEGTGSGSRFQTVDSSNIDGFVNCTKILGNLDFLITGLNGDPWHKIPALDPEKLNVFRTVREITGYLNIQSWPPHMHNFSVFSNLTTIGGRSLYNRGFSLLIMKNLNVTSLGFRSLKEISAGRIYISANRQLCYHHSLNWTKVLRGPTEERLDIKHNRPRRDCVAEGKVCDPLCSSGGCWGPGPGQCLSCRNYSRGGVCVTHCNFLNGEPREFAHEAECFSCHPECQPMEGTATCNGSGSDTCAQCAHFRDGPHCVSSCPHGVLGAKGPIYKYPDVQNECRPCHENCTQGCKGPELQDCLGQTLVLIGKTHLTMALTVIAGLVVIFMMLGGTFLYWRGRRIQNKRAMRRYLERGESIEPLDPSEKANKVLARIFKETELRKLKVLGSGVFGTVHKGVWIPEGESIKIPVCIKVIEDKSGRQSFQAVTDHMLAIGSLDHAHIVRLLGLCPGSSLQLVTQYLPLGSLLDHVRQHRGALGPQLLLNWGVQIAKGMYYLEEHGMVHRNLAARNVLLKSPSQVQVADFGVADLLPPDDKQLLYSEAKTPIKWMALESIHFGKYTHQSDVWSYGVTVWELMTFGAEPYAGLRLAEVPDLLEKGERLAQPQICTIDVYMVMVKCWMIDENIRPTFKELANEFTRMARDPPRYLVIKRESGPGIAPGPEPHGLTNKKLEEVELEPELDLDLDLEAEEDNLATTTLGSALSLPVGTLNRPRGSQSLLSPSSGYMPMNQGNLGESCQESAVSGSSERCPRPVSLHPMPRGCLASESSEGHVTGSEAELQEKVSMCRSRSRSRSPRPRGDSAYHSQRHSLLTPVTPLSPPGLEEEDVNGYVMPDTHLKGTPSSREGTLSSVGLSSVLGTEEEDEDEEYEYMNRRRRHSPPHPPRPSSLEELGYEYMDVGSDLSASLGSTQSCPLHPVPIMPTAGTTPDEDYEYMNRQRDGGGPGGDYAAMGACPASEQGYEEMRAFQGPGHQAPHVHYARLKTLRSLEATDSAFDNPDYWHSRLFPKANAQRT

SEQ ID NO: 28 - protein, 474 aa, Homo sapiens
MNSVSPAAAQYRSSSPEDARRRPEARRPRGPRGPDPNGLGPSGASGPALGSPGAGPSEPDEVDKFKAKFLTAWNNVKYGWVVKSRTSFSKISSIHLCGRRYRFEGEGDIQRFQRDFVSRLWLTYRRDFPPLPGGCLTSDCGWGCMLRSGQMMLAQGLLLHFLPRDWTWAEGMGLGPPELSGSASPSRYHGPARWMPPRWAQGAPELEQERRHRQIVSWFADHPRAPFGLHRLVELGQSSGKKAGDWYGPSLVAHILRKAVESCSDVTRLVVYVSQDCTVYKADVARLVARPDPTAEWKSVVILVPVRLGGETLNPVYVPCVKELLRCELCLGIMGGKPRHSLYFIGYQDDFLLYLDPHYCQPTVDVSQADFPLESFHCTSPRKMAFAKMDPSCTVGFYAGDRKEFETLCSELTRVLSSSSATERYPMFTLAEGHAQDHSLDDLCSQLAQPTLRLPRTGRLLRAKRPSSEDFVFL

SEQ ID NO: 29 - protein, 720 aa, Homo sapiens
MPPPSDIVKVAIEWPGANAQLLEIDQKRPLASIIKEVCDGWSLPNPEYYTLRYADGPQLYITEQTRSDIKNGTILQLAISPSRAARQLMERTQSSNMETRLDAMKELAKLSADVTFATEFINMDGIIVLTRLVESGTKLLSHYSEMLAFTLTAFLELMDHGIVSWDMVSITFIKQIAGYVSQPMVDVSILQRSLAILESMVLNSQSLYQKIAEEITVGQLISHLQVSNQEIQTYAIALINALFLKAPEDKRQDMANAFAQKHLRSIILNHVIRGNRPIKTEMAHQLYVLQVLTFNLLEERMMTKMDPNDQAQRDIIFELRRIAFDAESDPSNAPGSGTEKRKAMYTKDYKMLGFTNHINPAMDFTQTPPGMLALDNMLYLAKVHQDTYIRIVLENSSREDKHECPFGRSAIELTKMLCEILQVGELPNEGRNDYHPMFFTHDRAFEELFGICIQLLNKTWKEMRATAEDFNKVMQVVREQITRALPSKPNSLDQFKSKLRSLSYSEILRLRQSERMSQDDFQSPPIVELREKIQPEILELIKQQRLNRLCEGSSFRKIGNRRRQERFWYCRLALNHKVLHYGDLDDNPQGEVTFESLQEKIPVADIKAIVTGKDCPHMKEKSALKQNKEVLELAFSILYDPDETLNFIAPNKYEYCIWIDGLSALLGKDMSSELTKSDLDTLLSMEMKLRLLDLENIQIPEAPPPIPKEPSSYDFVYHYG

SEQ ID NO: 30 - protein, 2813 aa, Homo sapiens
MKLNPQQAPLYGDCVVTVLLAEEDKAEDDVVFYLVFLGSTLRHCTSTRKVSSDTLETIAPGHDCCETVKVQLCASKEGLPVFVVAEEDFHFVQDEAYDAAQFLATSAGNQQALNFTRFLDQSGPPSGDVNSLDKKLVLAFRHLKLPTEWNVLGTDQSLHDAGPRETLMHFAVRLGLLRLTWFLLQKPGGRGALSIHNQEGATPVSLALERGYHKLHQLLTEENAGEPDSWSSLSYEIPYGDCSVRHHRELDIYTLTSESDSHHEHPFPGDGCTGPIFKLMNIQQQLMKTNLKQMDSLMPLMMTAQDPSSAPETDGQFLPCAPEPTDPQRLSSSEETESTQCCPGSPVAQTESPCDLSSIVEEENTDRSCRKKNKGVERKGEEVEPAPIVDSGTVSDQDSCLQSLPDCGVKGTEGLSSCGNRNEETGTKSSGMPTDQESLSSGDAVLQRDLVMEPGTAQYSSGGELGGISTTNVSTPDTAGEMEHGLMNPDATVWKNVLQGGESTKERFENSNIGTAGASDVHVTSKPVDKISVPNCAPAASSLDGNKPAESSLAFSNEETSTEKTAETETSRSREESADAPVDQNSVVIPAAAKDKISDGLEPYTLLAAGIGEAMSPSDLALLGLEEDVMPHQNSETNSSHAQSQKGKSSPICSTTGDDKLCADSACQQNTVTSSGDLVAKLCDNIVSESESTTARQPSSQDPPDASHCEDPQAHTVTSDPVRDTQERADFCPFKVVDNKGQRKDVKLDKPLTNMLEVVSHPHPVVPKMEKELVPDQAVISDSTFSLANSPGSESVTKDDALSFVPSQKEKGTATPELHTATDYRDGPDGNSNEPDTRPLEDRAVGLSTSSTAAELQHGMGNTSLTGLGGEHEGPAPPAIPEALNIKGNTDSSLQSVGKATLALDSVLTEEGKLLVVSESSAAQEQDKDKAVTCSSIKENALSSGTLQEEQRTPPPGQDTQQFHEKSISADCAKDKALQLSNSPGASSAFLKAETEHNKEVAPQVSLLTQGGAAQSLVPPGASLATESRQEALGAEHNSSALLPCLLPDGSDGSDALNCSQPSPLDVGVKNTQSQGKTSACEVSGDVTVDVTGVNALQGMAEPRRENISHNTQDILIPNVLLSQEKNAVLGLPVALQDKAVTDPQGVGTPEMIPLDWEKGKLEGADHSCTMGDAEEAQIDDEAHPVLLQPVAKELPTDMELSAHDDGAPAGVREVMRAPPSGRERSTPSLPCMVSAQDAPLPKGADLIEEAASRIVDAVIEQVKAAGALLTEGEACHMSLSSPELGPLTKGLESAFTEKVSTFPPGESLPMGSTPEEATGSLAGCFAGREEPEKIILPVQGPEPAAEMPDVKAEDEVDFRASSISEEVAVGSIAATLKMKQGPMTQAINRENWCTIEPCPDAASLLASKQSPECENFLDVGLGRECTSKQGVLKRESGSDSDLFHSPSDDMDSIIFPKPEEEHLACDITGSSSSTDDTASLDRHSSHGSDVSLSQILKPNRSRDRQSLDGFYSHGMGAEGRESESEPADPGDVEEEEMDSITEVPANCSVLRSSMRSLSPFRRHSWGPGKNAASDAEMNHRSSMRVLGDVVRRPPIHRRSFSLEGLTGGAGVGNKPSSSLEVSSANAEELRHPFSGEERVDSLVSLSEEDLESDQREHRMFDQQICHRSKQQGFNYCTSAISSPLTKSISLMTISHPGLDNSRPFHSTFHNTSANLTESITEENYNFLPHSPSKKDSEWKSGTKVSRTFSYIKNKMSSSKKSKEKEKEKDKIKEKEKDSKDKEKDKKTVNGHTFSSIPVVGPISCSQCMKPFTNKDAYTCANCSAFVHKGCRESLASCAKVKMKQPKGSLQAHDTSSLPTVIMRNKPSQPKERPRSAVLLVDETATTPIFANRRSQQSVSLSKSVSIQNITGVGNDENMSNTWKFLSHSTDSLNKISKVNESTESLTDEGVGTDMNEGQLLGDFEIESKQLEAESWSRIIDSKFLKQQKKDVVKRQEVIYELMQTEFHHVRTLKIMSGVYSQGMMADLLFEQQMVEKLFPCLDELISIHSQFFQRILERKKESLVDKSEKNFLIKRIGDVLVNQFSGENAERLKKTYGKFCGQHNQSVNYFKDLYAKDKRFQAFVKKKMSSSVVRRLGIPECILLVTQRITKYPVLFQRILQCTKDNEVEQEDLAQSLSLVKDVIGAVDSKVASYEKKVRLNEIYTKTDSKSIMRMKSGQMFAKEDLKRKKLVRDGSVFLKNAAGRLKEVQAVLLTDILVFLQEKDQKYIFASLDQKSTVISLKKLIVREVAHEEKGLFLISMGMTDPEMVEVHASSKEERNSWIQIIQDTINTLNRDEDEGIPSENEEEKKMLDTRARELKEQLHQKDQKILLLLEEKEMIFRDMAECSTPLPEDCSPTHSPRVLFRSNTEEALKGGPLMKSAINEVEILQGLVSGNLGGTLGPTVSSPIEQDVVGPVSLPRRAETFGGFDSHQMNASKGGEKEEGDDGQDLRRTESDSGLKKGGNANLVFMLKRNSEQVVQSVVHLYELLSALQGVVLQQDSYIEDQKLVLSERALTRSLSRPSSLIEQEKQRSLEKQRQDLANLQKQQAQYLEEKRRREREWEARERELREREALLAQREEEVQQGQQDLEKEREELQQKKGTYQYDLERLRAAQKQLEREQEQLRREAERLSQRQTERDLCQVSHPHTKLMRIPSFFPSPEEPPSPSAPSIAKSGSLDSELSVSPKRNSISRTHKDKGPFHILSSTSQTNKGPEGQSQAPASTSASTRLFGLTKPKEKKEKKKKNKTSRSQPGDGPASEVSAEGEEIFC

SEQ ID NO: 31 - protein, 639 aa, Homo sapiens
MSARGPAIGIDLGTTYSCVGVFQHGKVEIIANDQGNRTTPSYVAFTDTERLIGDAAKNQVAMNPTNTIFDAKRLIGRKFEDATVQSDMKHWPFRVVSEGGKPKVQVEYKGETKTFFPEEISSMVLTKMKEIAEAYLGGKVHSAVITVPAYFNDSQRQATKDAGTITGLNVLRIINEPTAAAIAYGLDKKGCAGGEKNVLIFDLGGGTFDVSILTIEDGIFEVKSTAGDTHLGGEDFDNRMVSHLAEEFKRKHKKDIGPNKRAVRRLRTACERAKRTLSSSTQASIEIDSLYEGVDFYTSITRARFEELNADLFRGTLEPVEKALRDAKLDKGQIQEIVLVGGSTRIPKIQKLLQDFFNGKELNKSINPDEAVAYGAAVQAAILIGDKSENVQDLLLLDVTPLSLGIETAGGVMTPLIKRNTTIPTKQTQTFTTYSDNQSSVLVQVYEGERAMTKDNNLLGKFDLTGIPPAPRGVPQIEVTFDIDANGILNVTAADKSTGKENKITITNDKGRLSKDDIDRMVQEAERYKSEDEANRDRVAAKNALESYTYNIKQTVEDEKLRGKISEQDKNKILDKCQEVINWLDRNQMAEKDEYEHKQKELERVCNPIISKLYQGGPGGGSGGGGSGASGGPTIEEVD

SEQ ID NO: 32 - protein, 467 aa, Homo sapiens
MHSTTPISSLFSFTSPAVKRLLGWKQGDEEEKWAEKAVDSLVKKLKKKKGAMDELERALSCPGQPSKCVTIPRSLDGRLQVSHRKGLPHVIYCRVWRWPDLQSHHELKPLECCEFPFGSKQKEVCINPYHYRRVETPVLPPVLVPRHSEYNPQLSLLAKFRSASLHSEPLMPHNATYPDSFQQPPCSALPPSPSHAFSQSPCTASYPHSPGSPSEPESPYQHSVDTPPLPYHATEASETQSGQPVDATADRHVVLSIPNGDFRPVCYEEPQHWCSVAYYELNNRVGETFQASSRSVLIDGFTDPSNNRNRFCLGLLSNVNRNSTIENTRRHIGKGVHLYYVGGEVYAECVSDSSIFVQSRNCNYQHGFHPATVCKIPSGCSLKVFNNQLFAQLLAQSVHHGFEVVYELTKMCTIRMSFVKGWGAEYHRQDVTSTPCWIEIHLHGPLQWLDKVLTQMGSPHNPISSVS

SEQ ID NO: 33 - protein, 142 aa, Homo sapiens
MGAPTLPPAWQPFLKDHRISTFKNWPFLEGCACTPERMAEAGFIHCPTENEPDLAQCFFCFKELEGWEPDDDPIEEHKKHSSGCAFLSVKKQFEELTLGEFLKLDRERAKNKIAKETNNKKKEFEETAEKVRRAIEQLAAMD

SEQ ID NO: 34 - protein, 644 aa, Homo sapiens
MFSMRIVCLVLSVVGTAWTADSGEGDFLAEGGGVRGPRVVERHQSACKDSDWPFCSDEDWNYKCPSGCRMKGLIDEVNQDFTNRINKLKNSLFEYQKNNKDSHSLTTNIMEILRGDFSSANNRDNTYNRVSEDLRSRIEVLKRKVIEKVQHIQLLQKNVRAQLVDMKRLEVDIDIKIRSCRGSCSRALAREVDLKDYEDQQKQLEQVIAKDLLPSRDRQHLPLIKMKPVPDLVPGNFKSQLQKVPPEWKALTDMPQMRMELERPGGNEITRGGSTSYGTGSETESPRNPSSAGSWNSGSSGPGSTGNRNPGSSGTGGTATWKPGSSGPGSTGSWNSGSSGTGSTGNQNPGSPRPGSTGTWNPGSSERGSAGHWTSESSVSGSTGQWHSESGSFRPDSPGSGNARPNNPDWGTFEEVSGNVSPGTRREYHTEKLVTSKGDKELRTGKEKVTSGSTTTTRRSCSKTVTKTVIGPDGHKEVTKEVVTSEDGSDCPEAMDLGTLSGIGTLDGFRHRHPDEAAFFDTASTGKTFPGFFSPMLGEFVSETESRGSESGIFTNTKESSSHHPGIAEFPSRGKSSSYSKQFTSSTSYNRGDSTFESKSYKMADEAGSEADHEGTHSTKRGHAKSRPVRGIHTSPLGKPSLSP

SEQ ID NO: 35 - protein, 868 aa, Homo sapiens
MATFISVQLKKTSEVDLAKPLVKFIQQTYPSGGEEQAQYCRAAEELSKLRRAAVGRPLDKHEGALETLLRYYDQICSIEPKFPFSENQICLTFTWKDAFDKGSLFGGSVKLALASLGYEKSCVLFNCAALASQIAAEQNLDNDEGLKIAAKHYQFASGAFLHIKETVLSALSREPTVDISPDTVGTLSLIMLAQAQEVFFLKATRDKMKDAIIAKLANQAADYFGDAFKQCQYKDTLPKEVFPVLAAKHCIMQANAEYHQSILAKQQKKFGEEIARLQHAAELIKTVASRYDEYVNVKDFSDKINRALAAAKKDNDFIYHDRVPDLKDLDPIGKATLVKSTPVNVPISQKFTDLFEKMVPVSVQQSLAAYNQRKADLVNRSIAQMREATTLANGVLASLNLPAAIEDVSGDTVPQSILTKSRSVIEQGGIQTVDQLIKELPELLQRNREILDESLRLLDEEEATDNDLRAKFKERWQRTPSNELYKPLRAEGTNFRTVLDKAVQADGQVKECYQSHRDTIVLLCKPEPELNAAIPSANPAKTMQGSEVVNVLKSLLSNLDEVKKEREGLENDLKSVNFDMTSKFLTALAQDGVINEEALSVTELDRVYGGLTTKVQESLKKQEGLLKNIQVSHQEFSKMKQSNNEANLREEVLKNLATAYDNFVELVANLKEGTKFYNELTEILVRFQNKCSDIVFARKTERDELLKDLQQSIAREPSAPSIPTPAYQSSPAGGHAPTPPTPAPRTMPPTKPQPPARPPPPVLPANRAPSATAPSPVGAGTAAPAPSQTPGSAPPPQAQGPPYPTYPGYPGYCQMPMPMGYNPYAYGQYNMPYPPVYHQSPGQAPYPGPQQPSYPFPQPPQQSYYPQQ

SEQ ID NO: 36 - protein, 735 aa, Homo sapiens
MPLAQLKEPWPLMELVPLDPENGQTSGEEAGLQPSKDEGVLKEISITHHVKAGSEKADPSHFELLKVLGQGSFGKVFLVRKVTRPDSGHLYAMKVLKKATLKVRDRVRTKMERDILADVNHPFVVKLHYAFQTEGKLYLILDFLRGGDLFTRLSKEVMFTEEDVKFYLAELALGLDHLHSLGIIYRDLKPENILLDEEGHIKLTDFGLSKEAIDHEKKAYSFCGTVEYMAPEVVNRQGHSHSADWWSYGVLMFEMLTGSLPFQGKDRKETMTLILKAKLGMPQFLSTEAQSLLRALFKRNPANRLGSGPDGAEEIKRHVFYSTIDWNKLYRREIKPPFKPAVAQPDDTFYFDTEFTSRTPKDSPGIPPSAGAHQLFRGFSFVATGLMEDDGKPRAPQAPLHSVVQQLHGKNLVFSDGYVVKETIGVGSYSECKRCVHKATNMEYAVKVIDKSKRDPSEEIEILLRYGQHPNIITLKDVYDDGKHVYLVTELMRGGELLDKILRQKFFSEREASFVLHTIGKTVEYLHSQGVVHRDLKPSNILYVDESGNPECLRICDFGFAKQLRAENGLLMTPCYTANFVAPEVLKRQGYDEGCDIWSLGILLYTMLAGYTPFANGPSDTPEEILTRIGSGKFTLSGGNWNTVSETAKDLVSKMLHVDPHQRLTAKQVLQHPWVTQKDKLPQSQLSHQDLQLVKGAMAATYSALNSSKPTPQLKPIESSILAQRRVRKLPSTTL

SEQ ID NO: 37 - protein, 265 aa, Homo sapiens
MSAAPLVGYSSSGSEDESEDGMRTRPGDGSHRRGQSPLPRQRFPVPDSVLNMFPGTEEGPEDDSTKHGGRVRTFPHERGNWATHVYVPYEAKEEFLDLLDVLLPHAQTYVPRLVRMKVFHLSLSQSVVLRHHWILPFVQALKARMTSFHRFFFTANQVKIYTNQEKTRTFIGLEVTSGHAQFLDLVSEVDRVMEEFNLTTFYQDPSFHLSLAWCVGDARLQLEGQCLQELQAIVDGFEDAEVLLRVHTEQVRCKSGNKFFSMPLK

SEQ ID NO: 38 - protein, 202 aa, Homo sapiens
MSGRSVRAETRSRAKDDIKKVMAAIEKVRKWEKKWVTVGDTSLRIFKWVPVTDSKEKEKSKSNSSAAREPNGFPSDASANSSLLLEFQDENSNQSSVSDVYQLKVDSSTNSSPSPQQSESLSPAHTSDFRTDDSQPPTLGQEILEEPSLPSSEVADEPPTLTKEEPVPLETQVVEEEEDSGAPPLKRFCVDQPTVPQTASES

SEQ ID NO: 39 - protein, 445 aa, Homo sapiens
MAEYDLTTRIAHFLDRHLVFPLLEFLSVKEIYNEKELLQGKLDLLSDTNMVDFAMDVYKNLYSDDIPHALREKRTTVVAQLKQLQAETEPIVKMFEDPETTRQMQSTRDGRMLFDYLADKHGFRQEYLDTLYRYAKFQYECGNYSGAAEYLYFFRVLVPATDRNALSSLWGKLASEILMQNWDAAMEDLTRLKETIDNNSVSSPLQSLQQRTWLIHWSLFVFFNHPKGRDNIIDLFLYQPQYLNAIQTMCPHILRYLTTAVITNKDVRKRRQVLKDLVKVIQQESYTYKDPITEFVECLYVNFDFDGAQKKLRECESVLVNDFFLVACLEDFIENARLFIFETFCRIHQCISINMLADKLNMTPEEAERWIVNLIRNARLDAKIDSKLGHVVMGNNAVSPYQQVIEKTKSLSFRSQMLAMNIEKKLNQNSRSEAPNWATQDSGFY

SEQ ID NO: 40 - protein, 247 aa, Homo sapiens
MEEQPQMQDADEPADSGGEGRAGGPPQVAGAQAACSEDRMTLLLRLRAQTKQQLLEYKSMVDASEEKTPEQIMQEKQIEAKIEDLENEIEEVKVAFEIKKLALDRMRLSTALKKNLEKISRQSSVLMDNMKHLLELNKLIMKSQQESWDLEEKLLDIRKKRLQLKQASESKLLEIQTEKNKQKIDLDSMENSERIKIIRQNLQMEIKITTVIQHVFQNLILGSKVNWAEDPALKEIVLQLEKNVDMM

SEQ ID NO: 41 - protein, 72 aa, Homo sapiens
MSSKTASTNNIAQARRTVQQLRLEASIERIKVSKASADLMSYCEEHARSDPLLIGIPTSENPFKDKKTCIIL

SEQ ID NO: 42 - protein, 411 aa, Homo sapiens
MMGRSPGFAMQHIVGVPHVLVRRGLLGRDLFMTRTLCSPGPSQPGEKRPEEVALGLHHRLPALGRALGHSIQQRATSTAKTWWDRYEEFVGLNEVREAQGKVTEAEKVFMVARGLVREAREDLEVHQAKLKEVRDRLDRVSREDSQYLELATLEHRMLQEEKRLRTAYLRAEDSEREKFSLFSAAVRESHEKERTRAERTKNWSLIGSVLGALIGVAGSTYVNRVRLQELKALLLEAQKGPVSLQEAIREQASSYSRQQRDLHNLMVDLRGLVHAAGPGQDSGSQAGSPPTRDRDVDVLSAALKEQLSHSRQVHSCLEGLREQLDGLEKTCSQMAGVVQLVKSAAHPGLVEPADGAMPSFLLEQGSMILALSDTEQRLEAQVNRNTIYSTLVTCVTFVATLPVLYMLFKAS

SEQ ID NO: 43 - protein, 280 aa, Homo sapiens
MKFRAKIVDGACLNHFTRISNMIAKLAKTCTLRISPDKLNFILCDKLANGGVSMWCELEQENFFNEFQMEGVSAENNEIYLELTSENLSRALKTAQNARALKIKLTNKHFPCLTVSVELLSMSSSSRIVTHDIPIKVIPRKLWKDLQEPVVPDPDVSIYLPVLKTMKSVVEKMKNISNHLVIEANLDGELNLKIETELVCVTTHFKDLGNPPLASESTHEDRNVEHMAEVHIDIRKLLQFLAGQQVNPTKALCNIVNNKMVHFDLLHEDVSLQYFIPALS

SEQ ID NO: 44 - protein, 205 aa, Homo sapiens
MTERRVPFSLLRGPSWDPFRDWYPHSRLFDQAFGLPRLPEEWSQWLGGSSWPGYVRPLPPAAIESPAVAAPAYSRALSRQLSSGVSEIRHTADRWRVSLDVNHFAPDELTVKTKDGVVEITGKHEERQDEHGYISRCFTRKYTLPPGVDPTQVSSSLSPEGTLTVEAPMPKLATQSNEITIPVTFESRAQLGGPEAAKSDETAAK

SEQ ID NO: 45 - protein, 638 aa, Homo sapiens
MILFKQATYFISLFATVSCGCLTQLYENAFFRGGDVASMYTPNAQYCQMRCTFHPRCLLFSFLPASSINDMEKRFGCFLKDSVTGTLPKVHRTGAVSGHSLKQCGHQISACHRDIYKGVDMRGVNFNVSKVSSVEECQKRCTSNIRCQFFSYATQTFHKAEYRNNCLLKYSPGGTPTAIKVLSNVESGFSLKPCALSEIGCHMNIFQHLAFSDVDVARVLTPDAFVCRTICTYHPNCLFFTFYTNVWKIESQRNVCLLKTSESGTPSSSTPQENTISGYSLLTCKRTLPEPCHSKIYPGVDFGGEELNVTFVKGVNVCQETCTKMIRCQFFTYSLLPEDCKEEKCKCFLRLSMDGSPTRIAYGTQGSSGYSLRLCNTGDNSVCTTKTSTRIVGGTNSSWGEWPWQVSLQVKLTAQRHLCGGSLIGHQWVLTAAHCFDGLPLQDVWRIYSGILNLSDITKDTPFSQIKEIIIHQNYKVSEGNHDIALIKLQAPLNYTEFQKPICLPSKGDTSTIYTNCWVTGWGFSKEKGEIQNILQKVNIPLVTNEECQKRYQDYKITQRMVCAGYKEGGKDACKGDSGGPLVCKHNGMWRLVGITSWGEGCARREQPGVYTKVAEYMDWILEKTQSSDGKAQMQSPA

SEQ ID NO: 46 - protein, 1019 aa, Homo sapiens
MLWRVLLSKRPPFPHPELDFQEAPIPSCPGRLPGRKNSVALAAAPRKEPTGDREKPLPFPVLAPFSNPEHSAPAKVVRAAVPKQRKGSKVGDFGDAINWPTPGEIAHKSVQPQSHKPQPTRKLPPKKDMKEQEKGEGSDSKESPKTKSDESGEEKNGDEDCQRGGQKKKGNKHKWVPLQIDMKPEVPREKLASRPTRPPEPRHIPANRGEIKGSESATYVPVAPPTPAWQPEIKPEPAWHDQDETSSVKSDGAGGARASFRGRGRGRGRGRGRGRGGTRTHFDYQFGYRKFDGVEGPRTPKYMNNITYYFDNVSSTELYSVDQELLKDYIKRQIEYYFSVDNLERDFFLRRKMDADGFLPITLIASFHRVQALTTDISLIFAALKDSKVVEIVDEKVRRREEPEKWPLPPIVDYSQTDFSQLLNCPEFVPRQHYQKETESAPGSPRAVTPVPTKTEEVSNLKTLPKGLSASLPDLDSENWIEVKKRPRPSPARPKKSEESRFSHLTSLPQQLPSQQLMSKDQDEQEELDFLFDEEMEQMDGRKNTFTAWSDEESDYEIDDRDVNKILIVTQTPHYMRRHPGGDRTGNHTSRAKMSAELAKVINDGLFYYEQDLWAEKFEPEYSQIKQEVENFKKVNMISREQFDTLTPEPPVDPNQEVPPGPPRFQQVPTDALANKLFGAPEPSTIARSLPTTVPESPNYRNTRTPRTPRTPQLKDSSQTSRFYPVVKEGRTLDAKMPRKRKTRHSSNPPLESHVGWVMDSREHRPRTASISSSPSEGTPTVGSYGCTPQSLPKFQHPSHELLKENGFTQHVYHKYRRRCLNERKRLGIGQSQEMNTLFRFWSFFLRDHFNKKMYEEFKQLALEDAKEGYRYGLECLFRYYSYGLEKKFRLDIFKDFQEETVKDYEAGQLYGLEKFWAFLKYSKAKNLDIDPKLQEYLGKFRRLEDFRVDPPMGEEGNHKRHSVVAGGGGGEGRKRCPSQSSSRPAAMISQPPTPPTGQPVREDAKWTSQHSNTQTLGK

SEQ ID NO: 47 - protein, 585 aa, Homo sapiens
MTPPRLFWVWLLVAGTQGVNDGDMRLADGGATNQGRVEIFYRGQWGTVCDNLWDLTDASVVCRALGFENATQALGRAAFGQGSGPIMLDEVQCTGTEASLADCKSLGWLKSNCRHERDAGVVCTNETRSTHTLDLSRELSEALGQIFDSQRGCDLSISVNVQGEDALGFCGHTVILTANLEAQALWKEPGSNVTMSVDAECVPMVRDLLRYFYSRRIDITLSSVKCFHKLASAYGARQLQGYCASLFAILLPQDPSFQMPLDLYAYAVATGDALLEKLCLQFLAWNFEALTQAEAWPSVPTDLLQLLLPRSDLAVPSELALLKAVDTWSWGERASHEEVEGLVEKIRFPMMLPEELFELQFNLSLYWSHEALFQKKTLQALEFHTVPFQLLARYKGLNLTEDTYKPRIYTSPTWSAFVTDSSWSARKSQLVYQSRRGPLVKYSSDYFQAPSDYRYYPYQSFQTPQHPSFLFQDKRVSWSLVYLPTIQSCWNYGFSCSSDELPVLGLTKSGGSDRTIAYENKALMLCEGLFVADVTDFEGWKAAIPSALDTNSSKSTSSFPCPAGHFNGFRTVIRPFYLTNSSGVD

SEQ ID NO: 48 - protein, 1046 aa, Homo sapiens
MASSVGNVADSTEPTKRMLSFQGLAELAHREYQAGDFEAAERHCMQLWRQEPDNTGVLLLLSSIHFQCRRLDRSAHFSTLAIKQNPLLAEAYSNLGNVYKERGQLQEAIEHYRHALRLKPDFIDGYINLAAALVAAGDMEGAVQAYVSALQYNPDLYCVRSDLGNLLKALGRLEEAKACYLKAIETQPNFAVAWSNLGCVFNAQGEIWLAIHHFEKAVTLDPNFLDAYINLGNVLKEARIFDRAVAAYLRALSLSPNHAVVHGNLACVYYEQGLIDLAIDTYRRAIELQPHFPDAYCNLANALKEKGSVAEAEDCYNTALRLCPTHADSLNNLANIKREQGNIEEAVRLYRKALEVFPEFAAAHSNLASVLQQQGKLQEALMHYKEAIRISPTFADAYSNMGNTLKEMQDVQGALQCYTRAIQINPAFADAHSNLASIHKDSGNIPEAIASYRTALKLKPDFPDAYCNLAHCLQIVCDWTDYDERMKKLVSIVADQLEKNRLPSVHPHHSMLYPLSHGFRKAIAERHGNLCLDKINVLHKPPYEHPKDLKLSDGRLRVGYVSSDFGNHPTSHLMQSIPGMHNPDKFEVFCYALSPDDGTNFRVKVMAEANHFIDLSQIPCNGKAADRIHQDGIHILVNMNGYTKGARNELFALRPAPIQAMWLGYPGTSGALFMDYIITDQETSPAEVAEQYSEKLAYMPHTFFIGDHANMFPHLKKKAVIDFKSNGHIYDNRIVLNGIDLKAFLDSLPDVKIVKMKCPDGGDNADSSNTALNMPVIPMNTIAEAVIEMINRGQIQITINGFSISNGLATTQINNKAATGEEVPRTIIVTTRSQYGLPEDAIVYCNFNQLYKIDPSTLQMWANILKRVPNSVLWLLRFPAVGEPNIQQYAQNMGLPQNRIIFSPVAPKEEHVRRGQLADVCLDTPLCNGHTTGMDVLWAGTPMVTMPGETLASRVAASQLTCLGCLELIAKNRQEYEDIAVKLGTDLEYLKKVRGKVWKQRISSPLFNTKQYTMELERLYLQMWEHYAAGNKPDHMIKPVEVTESA

SEQ ID NO: 49 - protein, 738 aa, Homo sapiens
MQPRWAQGATMWLGVLLTLLLCSSLEGQENSFTINSVDMKSLPDWTVQNGKNLTLQCFADVSTTSHVKPQHQMLFYKDDVLFYNISSMKSTESYFIPEVRIYDSGTYKCTVIVNNKEKTTAEYQVLVEGVPSPRVTLDKKEAIQGGIVRVNCSVPEEKAPIHFTIEKLELNEKMVKLKREKNSRDQNFVILEFPVEEQDRVLSFRCQARIISGIHMQTSESTKSELVTVTESFSTPKFHISPTGMIMEGAQLHIKCTIQVTHLAQEFPEIIIQKDKAIVAHNRHGNKAVYSVMAMVEHSGNYTCKVESSRISKVSSIVVNITELFSKPELESSFTHLDQGERLNLSCSIPGAPPANFTIQKEDTIVSQTQDFTKIASKSDSGTYICTAGIDKVVKKSNTVQIVVCEMLSQPRISYDAQFEVIKGQTIEVRCESISGTLPISYQLLKTSKVLENSTKNSNDPAVFKDNPTEDVEYQCVADNCHSHAKMLSEVLRVKVIAPVDEVQISILSSKVVESGEDIVLQCAVNEGSGPITYKFYREKEGKPFYQMTSNATQAFWTKQKASKEQEGEYYCTAFNRANHASSVPRSKILTVRVILAPWKKGLIAVVIIGVIIALLIIAAKCYFLRKAKAKQMPVEMSRPAVPLLNSNNEKMSDPNMEANSHYGHNDDVRNHAMKPINDNKEPLNSDVQYTEVQVSSAESHKDLGKKDTETVYSEVRKAVPDAVESRYSRTEGSLDGT

SEQ ID NO: 50 - protein, 1158 aa, Homo sapiens
MTHGEELGSDVHQDSIVLTYLEGLLMHQAAGGSGTAVDKKSAGHNEEDQNFNISGSAFPTCQSNGPVLNTHTYQGSGMLHLKKARLLQSSEDWNAAKRKRLSDSIMNLNVKKEALLAGMVDSVPKGKQDSTLLASLLQSFSSRLQTVALSQQIRQSLKEQGYALSHDSLKVEKDLRCYGVASSHLKTLLKKSKVKDQKPDTNLPDVTKNLIRDRFAESPHHVGQSGTKVMSEPLSCAARLQAVASMVEKRASPATSPKPSVACSQLALLLSSEAHLQQYSREHALKTQNANQAASERLAAMARLQENGQKDVGSYQLPKGMSSHLNGQARTSSSKLMASKSSATVFQNPMGIIPSSPKNAGYKNSLERNNIKQAANNSLLLHLLKSQTIPKPMNGHSHSERGSIFEESSTPTTIDEYSDNNPSFTDDSSGDESSYSNCVPIDLSCKHRTEKSESDQPVSLDNFTQSLLNTWDPKVPDVDIKEDQDTSKNSKLNSHQKVTLLQLLLGHKNEENVEKNTSPQGVHNDVSKFNTQNYARTSVIESPSTNRTTPVSTPPLLTSSKAGSPINLSQHSLVIKWNSPPYVCSTQSEKLTNTASNHSMDLTKSKDPPGEKPAQNEGAQNSATFSASKLLQNLAQCGMQSSMSVEEQRPSKQLLTGNTDKPIGMIDRLNSPLLSNKTNAVEENKAFSSQPTGPEPGLSGSEIENLLERRTVLQLLLGNPNKGKSEKKEKTPLRDESTQEHSERALSEQILMVKIKSEPCDDLQIPNTNVHLSHDAKSAPFLGMAPAVQRSAPALPVSEDFKSEPVSPQDFSFSKNGLLSRLLRQNQDSYLADDSDRSHRNNEMALLESKNLCMVPKKRKLYTEPLENPFKKMKNNIVDAANNHSAPEVLYGSLLNQEELKFSRNDLEFKYPAGHGSASESEHRSWARESKSFNVLKQLLLSENCVRDLSPHRSNSVADSKKKGHKNNVTNSKPEFSISSLNGLMYSSTQPSSCMDNRTFSYPGVVKTPVSPTFPEHLGCAGSRPESGLLNGCSMPSEKGPIKWVITDAEKNEYEKDSPRLTKTNPILYYMLQKGGNSVTSRETQDKDIWREASSAESVSQVTAKEELLPTAETKASFFNLRSPYNSHMGNNASRPHSANGEVYGLLGSVLTIKKESE

SEQ ID NO: 51 - protein, 206 aa, Homo sapiens
MAASTASHRPIKGILKNKTSTTSSMVASAEQPRGNVDEELSKKSQKWDEMNILATYHPADKDYGLMKIDEPSTPYHSMMGDDEDACSDTEATEAMAPDILARKLAAAEGLEPKYRIQEQESSGEEDSDLSPEERGKKKRQFEMKRKLHYNEGLNIKLARQLISKDLHDDDEDEEMLETADGESMNTEESNQGSTPSDQQQNKLRSS

SEQ ID NO: 52 - protein, 155 aa, Homo sapiens
MVLSGALCFRMKDSALKVLYLHNNQLLAGGLHAGKVIKGEEISVVPNRWLDASLSPVILGVQGGSQCLSCGVGQEPTLTLEPVNIMELYLGAKESKSFTFYRRDMGLTSSFESAAYPGWFLCTVPEADQPVRLTQLPENGGWNAPITDFYFQQCD

SEQ ID NO: 53 - protein, 306 aa, Homo sapiens
MSLKLQASNVTNKNDPKSINSRVFIGNLNTALVKKSDVETIFSKYGRVAGCSVHKGYAFVQYSNERHARAAVLGENGRVLAGQTLDINMAGEPKPDRPKGLKRAASAIYSGYIFDYDYYRDDFYDRLFDYRGRLSPVPVPRAVPVKRPRVTVPLVRRVKTNVPVKLFARSTAVTTSSAKIKLKSSELQAIKTELTQIKSNIDALLSRLEQIAAEQKANPDGKKKGDGGGAGGGGGGGGSGGGGSGGGGGGGSSRPPAPQENTTSEAGLPQGEARTRDDGDEEGLLTHSEEELEHSQDTDADDGALQ

SEQ ID NO: 54 - protein, 104 aa, Homo sapiens
MGQCRSANAEDAQEFSDVERAIETLIKNFHQYSVEGGKETLTPSELRDLVTQQLPHLMPSNCGLEEKIANLGSCNDSKLEFRSFWELIGEAAKSVKLERPVRGH

SEQ ID NO: 55 - protein, 437 aa, Homo sapiens
MTQFLPPNLLALFAPRDPIPYLPPLEKLPHEKHHNQPYCGIAPYIREFEDPRDAPPPTRAETREERMERKRREKIERRQQEVETELKMWDPHNDPNAQGDAFKTLFVARVNYDTTESKLRREFEVYGPIKRIHMVYSKRSGKPRGYAFIEYEHERDMHSAYKHADGKKIDGRRVLVDVERGRTVKGWRPRRLGGGLGGTRRGGADVNIRHSGRDDTSRYDERPGPSPLPHRDRDRDRERERRERSRERDKERERRRSRSRDRRRRSRSRDKEERRRSRERSKDKDRDRKRRSSRSRERARRERERKEELRGGGGDMAEPSEAGDAPPDDGPPGELGPDGPDGPEEKGRDRDRERRRSHRSERERRRDRDRDRDRDREHKRGERGSERGRDEARGGGGGQDNGLEGLGNDSRDMYMESEGGDGYLAPENGYLMEAAPE

SEQ ID NO: 56 - protein, 282 aa, Homo sapiens
MAVPETRPNHTIYINNLNEKIKKDELKKSLYAIFSQFGQILDILVSRSLKMRGQAFVIFKEVSSATNALRSMQGFPFYDKPMRIQYAKTDSDIIAKMKGTFVERDRKREKRKPKSQETPATKKAVQGGGATPVVGAVQGPVPGMPPMTQAPRIMHHMPGQPPYMPPPGMIPPPGLAPGQIPPGAMPPQQLMPGQMPPAQPLSENPPNHILFLTNLPEETNELMLSMLFNQFPGFKEVRLVPGRHDIAFVEFDNEVQAGAARDALQGFKITQNNAMKISFAKK

SEQ ID NO: 57 - protein, 5335 aa, Homo sapiens
MLVIWILTLALRLCASVTTVTPGSTVNTSIGGNTTSASTPSSSDPFTTFSDYGVSVTFITGSTATKHFLDSSTNSGHSEESTVSHSGPGATGTTLFPSHSATSVFVGEPKTSPITSASMETTALPGSTTTAGLSEKSTTFYSSPRSPDRTLSPARTTSSGVSEKSTTSHSRPGPTHTIAFPDSTTMPGVSQESTASHSIPGSTDTTLSPGTTTPSSLGPESTTFHSSPGYTKTTRLPDNTTTSGLLEASTPVHSSTGSPHTTLSPSSSTTHEGEPTTFQSWPSSKDTSPAPSGTTSAFVKLSTTYHSSPSSTPTTHFSASSTTLGHSEESTPVHSSPVATATTPPPARSATSGHVEESTAYHRSPGSTQTMHFPESSTTSGHSEESATFHGSTTHTKSSTPSTTAALAHTSYHSSLGSTETTHFRDSSTISGRSEESKASHSSPDAMATTVLPAGSTPSVLVGDSTPSPISSGSMETTALPGSTTKPGLSEKSTTFYSSPRSPDTTHLPASMTSSGVSEESTTSHSRPGSTHTTAFPGSTTMPGLSQESTASHSSPGPTDTTLSPGSTTASSLGPEYTTFHSRPGSTETTLLPDNTTASGLLEASMPVHSSTRSPHTTLSPAGSTTRQGESTTFHSWPSSKDTRPAPPTTTSAFVEPSTTSHGSPSSIPTTHISARSTTSGLVEESTTYHSSPGSTQTMHFPESDTTSGRGEESTTSHSSTTHTISSAPSTTSALVEEPTSYHSSPGSTATTHFPDSSTTSGRSEESTASHSSQDATGTIVLPARSTTSVLLGESTTSPISSGSMETTALPGSTTTPGLSERSTTFHSSPRSPATTLSPASTTSSGVSEESTTSRSRPGSTHTTAFPDSTTTPGLSRHSTTSHSSPGSTDTTLLPASTTTSGPSQESTTSHSSSGSTDTALSPGSTTALSFGQESTTFHSNPGSTHTTLFPDSTTSSGIVEASTRVHSSTGSPRTTLSPASSTSPGLQGESTAFQTHPASTHTTPSPPSTATAPVEESTTYHRSPGSTPTTHFPASSTTSGHSEKSTIFHSSPDASGTTPSSAHSTTSGRGESTTSRISPGSTEITTLPGSTTTPGLSEASTTFYSSPRSPTTTLSPASMTSLGVGEESTTSRSQPGSTHSTVSPASTTTPGLSEESTTVYSSSRGSTETTVFPHSTTTSVHGEEPTTFHSRPASTHTTLFTEDSTTSGLTEESTAFPGSPASTQTGLPATLTTADLGEESTTFPSSSGSTGTKLSPARSTTSGLVGESTPSRLSPSSTETTTLPGSPTTPSLSEKSTTFYTSPRSPDATLSPATTTSSGVSEESSTSHSQPGSTHTTAFPDSTTTSDLSQEPTTSHSSQGSTEATLSPGSTTASSLGQQSTTFHSSPGDTETTLLPDDTITSGLVEASTPTHSSTGSLHTTLTPASSTSAGLQEESTTFQSWPSSSDTTPSPPGTTAAPVEVSTTYHSRPSSTPTTHFSASSTTLGRSEESTTVHSSPGATGTALFPTRSATSVLVGEPTTSPISSGSTETTALPGSTTTAGLSEKSTTFYSSPRSPDTTLSPASTTSSGVSEESTTSHSRPGSTHTTAFPGSTTMPGVSQESTASHSSPGSTDTTLSPGSTTASSLGPESTTFHSSPGSTETTLLPDNTTASGLLEASTPVHSSTGSPHTTLSPAGSTTRQGESTTFQSWPSSKDTMPAPPTTTSAFVELSTTSHGSPSSTPTTHFSASSTTLGRSEESTTVHSSPVATATTPSPARSTTSGLVEESTAYHSSPGSTQTMHFPESSTASGRSEESRTSHSSTTHTISSPPSTTSALVEEPTSYHSSPGSTATTHFPDSSTTSGRSEESTASHSSQDATGTIVLPARSTTSVLLGESTTSPISSGSMETTALPGSTTTPGLSEKSTTFHSSPRSPATTLSPASTTSSGVSEESTTSHSRPGSTHTTAFPDSTTTPGLSRHSTTSHSSPGSTDTTLLPASTTTSGPSQESTTSHSSPGSTDTALSPGSTTALSFGQESTTFHSSPGSTHTTLFPDSTTSSGIVEASTRVHSSTGSPRTTLSPASSTSPGLQGESTAFQTHPASTHTTPSPPSTATAPVEESTTYHRSPGSTPTTHFPASSTTSGHSEKSTIFHSSPDASGTTPSSAHSTTSGRGESTTSRISPGSTEITTLPGSTTTPGLSEASTTFYSSPRSPTTTLSPASMTSLGVGEESTTSRSQPGSTHSTVSPASTTTPGLSEESTTVYSSSPGSTETTVFPRTPTTSVRGEEPTTFHSRPASTHTTLFTEDSTTSGLTEESTAFPGSPASTQTGLPATLTTADLGEESTTFPSSSGSTGTTLSPARSTTSGLVGESTPSRLSPSSTETTTLPGSPTTPSLSEKSTTFYTSPRSPDATLSPATTTSSGVSEESSTSHSQPGSTHTTAFPDSTTTPGLSRHSTTSHSSPGSTDTTLLPASTTTSGPSQESTTSHSSPGSTDTALSPGSTTALSFGQESTTFHSSPGSTHTTLFPDSTTSSGIVEASTRVHSSTGSPRTTLSPASSTSPGLQGESTTFQTHPASTHTTPSPPSTATAPVEESTTYHRSPGSTPTTHFPASSTTSGHSEKSTIFHSSPDASGTTPSSAHSTTSGRGESTTSRISPGSTEITTLPGSTTTPGLSEASTTFYSSPRSPTTTLSPASMTSLGVGEESTTSRSQPGSTHSTVSPASTTTPGLSEESTTVYSSSPGSTETTVFPRSTTTSVRGEEPTTFHSRPASTHTTLFTEDSTTSGLTEESTAFPGSPASTQTGLPATLTTADLGEESTTFPSSSGSTGTTLSPARSTTSGLVGESTPSRLSPSSTETTTLPGSPTTPSLSEKSTTFYTSPRSPDATLSPATTTSSGVSEESSTSHSQPGSTHTTAFPDSTTTSGLSQEPTASHSSQGSTEATLSPGSTTASSLGQQSTTFHSSPGDTETTLLPDDTITSGLVEASTPTHSSTGSLHTTLTPASSTSAGLQEESTTFQSWPSSSDTTPSPPGTTAAPVEVSTTYHSRPSSTPTTHFSASSTTLGRSEESTTVHSSPGATGTALFPTRSATSVLVGEPTTSPISSGSTETTALPGSTTTAGLSEKSTTFYSSPRSPDTTLSPASTTSSGVSEESTTSHSRPGSTHTTAFPGSTTMPGVSQESTASHSSPGSTDTTLSPGSTTASSLGPESTTFHSGPGSTETTLLPDNTTASGLLEASTPVHSSTGSPHTTLSPAGSTTRQGESTTFQSWPNSKDTTPAPPTTTSAFVELSTTSHGSPSSTPTTHFSASSTTLGRSEESTTVHSSPVATATTPSPARSTTSGLVEESTTYHSSPGSTQTMHFPESDTTSGRGEESTTSHSSTTHTISSAPSTTSALVEEPTSYHSSPGSTATTHFPDSSTTSGRSEESTASHSSQDATGTIVLPARSTTSVLLGESTTSPISSGSMETTALPGSTTTPGLSEKSTTFHSSPRSPATTLSPASTTSSGVSEESTTSHSRPGSTHTTAFPDSTTTPGLSRHSTTSHSSPGSTDTTLLPASTTTSGSSQESTTSHSSSGSTDTALSPGSTTALSFGQESTTFHSSPGSTHTTLFPDSTTSSGIVEASTRVHSSTGSPRTTLSPASSTSPGLQGESTAFQTHPASTHTTPSPPSTATAPVEESTTYHRSPGSTPTTHFPASSTTSGHSEKSTIFHSSPDASGTTPSSAHSTTSGRGESTTSRISPGSTEITTLPGSTTTPGLSEASTTFYSSPRSPTTTLSPASMTSLGVGEESTTSRSQPGSTHSTVSPASTTTPGLSEESTTVYSSSPGSTETTVFPRSTTTSVRREEPTTFHSRPASTHTTLFTEDSTTSGLTEESTAFPGSPASTQTGLPATLTTADLGEESTTFPSSSGSTGTKLSPARSTTSGLVGESTPSRLSPSSTETTTLPGSPTTPSLSEKSTTFYTSPRSPDATLSPATTTSSGVSEESSTSHSQPGSTHTTAFPDSTTTSGLSQEPTTSHSSQGSTEATLSPGSTTASSLGQQSTTFHSSPGDTETTLLPDDTITSGLVEASTPTHSSTGSLHTTLTPASSTSTGLQEESTTFQSWPSSSDTTPSPPSTTAVPVEVSTTYHSRPSSTPTTHFSASSTTLGRSEESTTVHSSPGATGTALFPTRSATSVLVGEPTTSPISSGSTETTALPGSTTTAGLSEKSTTFYSSPRSPDTTLSPASTTSSGVSEESTTSHSRPGSMHTTAFPSSTTMPGVSQESTASHSSPGSTDTTLSPGSTTASSLGPESTTFHSSPGSTETTLLPDNTTASGLLEASTPVHSSTGSPHTTLSPAGSTTRQGESTTFQSWPNSKDTTPAPPTTTSAFVELSTTSHGSPSSTPTTHFSASSTTLGRSEESTTVHSSPVATATTPSPARSTTSGLVEESTTYHSSPGSTQTMHFPESNTTSGRGEESTTSHSSTTHTISSAPSTTSALVEEPTSYHSSPGSTATTHFPDSSTTSGRSEESTASHSSQDATGTIVLPARSTTSVLLGESTTSPISSGSMETTALPGSTTTPGLSEKSTTFHSSPSSTPTTHFSASSTTLGRSEESTTVHSSPVATATTPSPARSTTSGLVEESTAYHSSPGSTQTMHFPESSTASGRSEESRTSHSSTTHTISSPPSTTSALVEEPTSYHSSPGSIATTHFPESSTTSGRSEESTASHSSPDTNGITPLPAHFTTSGRIAESTTFYISPGSMETTLASTATTPGLSAKSTILYSSSRSPDQTLSPASMTSSSISGEPTSLYSQAESTHTTAFPASTTTSGLSQESTTFHSKPGSTETTLSPGSITTSSFAQEFTTPHSQPGSALSTVSPASTTVPGLSEESTTFYSSPGSTETTAFSHSNTMSIHSQQSTPFPDSPGFTHTVLPATLTTTDIGQESTAFHSSSDATGTTPLPARSTASDLVGEPTTFYISPSPTYTTLFPASSSTSGLTEESTTFHTSPSFTSTIVSTESLETLAPGLCQEGQIWNGKQCVCPQGYVGYQCLSPLESFPVETPEKLNATLGMTVKVTYRNFTEKMNDASSQEYQNFSTLFKNRMDVVLKGDNLPQYRGVNIRRLLNGSIVVKNDVILEADYTLEYEELFENLAEIVKAKIMNETRTTLLDPDSCRKAILCYSEEDTFVDSSVTPGFDFQEQCTQKAAEGYTQFYYVDVLDGKLACVNKCTKGTKSQMNCNLGTCQLQRSGPRCLCPNTNTHWYWGETCEFNIAKSLVYGIVGAVMAVLLLALIILIILFSLSQRKRHREQYDVPQEWRKEGTPGIFQKTAIWEDQNLRESRFGLENAYNNFRPTLETVDSGTELHIQRPEMVASTV

SEQ ID NO: 58 - protein, 130 aa, Homo sapiens
MSGRGKQGGKARAKAKSRSSRAGLQFPVGRVHRLLRKGNYAERVGAGAPVYMAAVLEYLTAEILELAGNAARDNKKTRIIPRHLQLAIRNDEELNKLLGKVTIAQGGVLPNIQAVLLPKKTESHHKAKGK

SEQ ID NO: 59 - protein, 175 aa, Homo sapiens
MPKRSCPFADVAPLQLKVRVSQRELSRGVCAERYSQEVFEKTKRLLFLGAQAYLDHVWDEGCAVVHLPESPKPGPTGAPRAARGQMLIGPDGRLIRSLGQASEADPSGVASIACSSCVRAVDGKAVCGQCERALCGQCVRTCWGCGSVACTLCGLVDCSDMYEKVLCTSCAMFET

SEQ ID NO: 60 - protein, 352 aa, Homo sapiens
  misc_feature (324)..(324): Xaa can be any naturally occurring amino acid
MSDRPTARRWGKCGPLCTRENIMVAFKGVWTQAFWKAVTAEFLAMLIFVLLSLGSTINWGGTEKPLPVDMVLISLCFGLSIATMVQCFGHISGGHINPAVTVAMVCTRKISIAKSVFYIAAQCLGAIIGAGILYLVTPPSVVGGLGVTMVHGNLTAGHGLLVELIITFQLVFTIFASCDSKRTDVTGSIALAIGFSVAIGHLFAINYTGASMNPARSFGPAVIMGNWENHWIYWVGPIIGAVLAGGLYEYVFCPDVEFKRRFKEAFSKAAQQTKGSYMEVEDNRSQVETDDLILKPGVVHVIDVDRGEEKKGKDQSGEVLSSVXLEDRTESRQDSLELSSDFLPPIKETDLL

SEQ ID NO: 61 - protein, 115 aa, Homo sapiens
MRYVASYLLAALGGNSSPSAKDIKKILDSVGIEADDDRLNKVISELNGKNIEDVIAQGIGKLASVPAGGAVAVSAAPGSAAPAAGSAPAAAEEKKDEKKEESEESDDDMGFGLFD

SEQ ID NO: 62 - protein, 310 aa, Homo sapiens
MRRAALWLWLCALALSLQPALPQIVATNLPPEDQDGSGDDSDNFSGSGAGALQDITLSQQTPSTWKDTQLLTAIPTSPEPTGLEATAASTSTLPAGEGPKEGEAVVLPEVEPGLTAREQEATPRPRETTQLPTTHQASTTTATTAQEPATSHPHRDMQPGHHETSTPAGPSQADLHTPHTEDGGPSATERAAEDGASSQLPAAEGSGEQDFTFETSGENTAVVAVEPDRRNQSPVDQGATGASQGLLDRKEVLGGVIAGGLVGLIFAVCLVGFMLYRMKKKDEGSYSLEEPKQANGGAYQKPTKQEEFYA

SEQ ID NO: 63 - protein, 288 aa, Homo sapiens
MSDSGEQNYGERESRSASRSGSAHGSGKSARHTPARSRSKEDSRRSRSKSRSRSESRSRSRRSSRRHYTRSRSRSRSHRRSRSRSYSRDYRRRHSHSHSPMSTRRRHVGNRANPDPNCCLGVFGLSLYTTERDLREVFSKYGPIADVSIVYDQQSRRSRGFAFVYFENVDDAKEAKERANGMELDGRRIRVDFSITKRPHTPTPGIYMGRPTYGSSRRRDYYDRGYDRGYDDRDYYSRSYRGGGGGGGGWRAAQDRDQIYRRRSPSPYYSRGGYRSRSRSRSYSPRRY

SEQ ID NO: 64 - protein, 407 aa, Homo sapiens
MDSPCQPQPLSQALPQLPGSSSEPLEPEPGRARMGVESYLPCPLLPSYHCPGVPSEASAGSGTPRATATSTTASPLRDGFGGQDGGELRPLQSEGAAALVTKGCQRLAAQGARPEAPKRKWAEDGGDAPSPSKRPWARQENQEAEREGGMSCSCSSGSGEASAGLMEEALPSAPERLALDYIVPCMRYYGICVKDSFLGAALGGRVLAEVEALKRGGRLRDGQLVSQRAIPPRSIRGDQIAWVEGHEPGCRSIGALMAHVDAVIRHCAGRLGSYVINGRTKAMVACYPGNGLGYVRHVDNPHGDGRCITCIYYLNQNWDVKVHGGLLQIFPEGRPVVANIEPLFDRLLIFWSDRRNPHEVKPAYATRYAITVWYFDAKERAAAKDKYQLASGQKGVQVPVSQPPTPT

SEQ ID NO: 65 - protein, 923 aa, Homo sapiens
MKVGWPGESCWQVGLAVEDSPALGAPRVGALPDVVPEGTLLNMVLRRMHRPRSCSYQLLLEHQRPSCIQGLRWTPLTNSEESLDFSESLEQASTERVLRAGRQLHRHLLATCPNLIRDRKYHLRLYRQCCSGRELVDGILALGLGVHSRSQVVGICQVLLDEGALCHVKHDWAFQDRDAQFYRFPGPEPEPVGTHEMEEELAEAVALLSQRGPDALLTVALRKPPGQRTDEELDLIFEELLHIKAVAHLSNSVKRELAAVLLFEPHSKAGTVLFSQGDKGTSWYIIWKGSVNVVTHGKGLVTTLHEGDDFGQLALVNDAPRAATIILREDNCHFLRVDKQDFNRIIKDVEAKTMRLEEHGKVVLVLERASQGAGPSRPPTPGRNRYTVMSGTPEKILELLLEAMGPDSSAHDPTETFLSDFLLTHRVFMPSAQLCAALLHHFHVEPAGGSEQERSTYVCNKRQQILRLVSQWVALYGSMLHTDPVATSFLQKLSDLVGRDTRLSNLLREQWPERRRCHRLENGCGNASPQMKARNLPVWLPNQDEPLPGSSCAIQVGDKVPYDICRPDHSVLTLQLPVTASVREVMAALAQEDGWTKGQVLVKVNSAGDAIGLQPDARGVATSLGLNERLFVVNPQEVHELIPHPDQLGPTVGSAEGLDLVSAKDLAGQLTDHDWSLFNSIHQVELIHYVLGPQHLRDVTTANLERFMRRFNELQYWVATELCLCPVPGPRAQLLRKFIKLAAHLKEQKNLNSFFAVMFGLSNSAISRLAHTWERLPHKVRKLYSALERLLDPSWNHRVYRLALAKLSPPVIPFMPLLLKDMTFIHEGNHTLVENLINFEKMRMMARAARMLHHCRSHNPVPLSPLRSRVSHLHEDSQVARISTCSEQSLSTRSPASTWAYVQQLKVIDNQRELSRLSRELEP

SEQ ID NO: 66 - protein, 109 aa, Homo sapiens
MNPALGNQTDVAGLFLANSSEALERAVRCCTQASVVTDDGFAEGGPDERSLYIMRVVQIAVMCVLSLTVVFGIFFLGCNLLIKSEGMINFLVKDRRPSKEVEAVVVGPY

SEQ ID NO: 67 - protein, 1437 aa, Homo sapiens
MDFSFSFMQGIMGNTIQQPPQLIDSANIRQEDAFDNNSDIAEDGGQTPYEATLQQGFQYPATTEDLPPLTNGYPSSISVYETQTKYQSYNQYPNGSANGFGAVRNFSPTDYYHSEIPNTRPHEILEKPSPPQPPPPPSVPQTVIPKKTGSPEIKLKITKTIQNGRELFESSLCGDLLNEVQASEHTKSKHESRKEKRKKSNKHDSSRSEERKSHKIPKLEPEEQNRPNERVDTVSEKPREEPVLKEEAPVQPILSSVPTTEVSTGVKFQVGDLVWSKVGTYPWWPCMVSSDPQLEVHTKINTRGAREYHVQFFSNQPERAWVHEKRVREYKGHKQYEELLAEATKQASNHSEKQKIRKPRPQRERAQWDIGIAHAEKALKMTREERIEQYTFIYIDKQPEEALSQAKKSVASKTEVKKTRRPRSVLNTQPEQTNAGEVASSLSSTEIRRHSQRRHTSAEEEEPPPVKIAWKTAAARKSLPASITMHKGSLDLQKCNMSPVVKIEQVFALQNATGDGKFIDQFVYSTKGIGNKTEISVRGQDRLIISTPNQRNEKPTQSVSSPEATSGSTGSVEKKQQRRSIRTRSESEKSTEVVPKKKIKKEQVETVPQATVKTGLQKGASEISDSCKPLKKRSRASTDVEMTSSAYRDTSDSDSRGLSDLQVGFGKQVDSPSATADADVSDVQSMDSSLSRRGTGMSKKDTVCQICESSGDSLIPCEGECCKHFHLECLGLASLPDSKFICMECKTGQHPCFSCKVSGKDVKRCSVGACGKFYHEACVRKFPTAIFESKGFRCPQHCCSACSMEKDIHKASKGRMMRCLRCPVAYHSGDACIAAGSMLVSSYILICSNHSKRSSNSSAVNVGFCFVCARGLIVQDHSDPMFSSYAYKSHYLLNESNRAELMKLPMIPSSSASKKKCEKGGRLLCCESCPASFHPECLSIEMPEGCWNCNDCKAGKKLHYKQIVWVKLGNYRWWPAEICNPRSVPLNIQGLKHDLGDFPVFFFGSHDYYWVHQGRVFPYVEGDKSFAEGQTSINKTFKKALEEAAKRFQELKAQRESKEALEIEKNSRKPPPYKHIKANKVIGKVQIQVADLSEIPRCNCKPADENPCGLESECLNRMLQYECHPQVCPAGDRCQNQCFTKRLYPDAEIIKTERRGWGLRTKRSIKKGEFVNEYVGELIDEEECRLRIKRAHENSVTNFYMLTVTKDRIIDAGPKGNYSRFMNHSCNPNCETQKWTVNGDVRVGLFALCDIPAGMELTFNYNLDCLGNGRTECHCGADNCSGFLGVRPKSACASTNEEKAKNAKLKQKRRKIKTEPKQMHEDYCFQCGDGGELVMCDKKDCPKAYHLLCLNLTQPPYGKWECPWHQCDECSSAAVSFCEFCPHSFCKDHEKGALVPSALEGRLCCSEHDPMAPVSPEYWSKIKCKWESQDHGEEVKE

SEQ ID NO: 68 - protein, 1158 aa, Homo sapiens
MSADSSPLVGSTPTGYGTLTIGTSIDPLSSSVSSVRLSGYCGSPWRVIGYHVVVWMMAGIPLLLFRWKPLWGVRLRLRPCNLAHAETLVIEIRDKEDSSWQLFTVQVQTEAIGEGSLEPSPQSQAEDGRSQAAVGAVPEGAWKDTAQLHKSEEAKRVLRYYLFQGQRYIWIETQQAFYQVSLLDHGRSCDDVHRSRHGLSLQDQMVRKAIYGPNVISIPVKSYPQLLVDEALNPYYGFQAFSIALWLADHYYWYALCIFLISSISICLSLYKTRKQSQTLRDMVKLSMRVCVCRPGGEEEWVDSSELVPGDCLVLPQEGGLMPCDAALVAGECMVNESSLTGESIPVLKTALPEGLGPYCAETHRRHTLFCGTLILQARAYVGPHVLAVVTRTGFCTAKGGLVSSILHPRPINFKFYKHSMKFVAALSVLALLGTIYSIFILYRNRVPLNEIVIRALDLVTVVVPPALPAAMTVCTLYAQSRLRRQGIFCIHPLRINLGGKLQLVCFDKTGTLTEDGLDVMGVVPLKGQAFLPLVPEPRRLPVGPLLRALATCHALSRLQDTPVGDPMDLKMVESTGWVLEEEPAADSAFGTQVLAVMRPPLWEPQLQAMEEPPVPVSVLHRFPFSSALQRMSVVVAWPGATQPEAYVKGSPELVAGLCNPETVPTDFAQMLQSYTAAGYRVVALASKPLPTVPSLEAAQQLTRDTVEGDLSLLGLLVMRNLLKPQTTPVIQALRRTRIRAVMVTGDNLQTAVTVARGCGMVAPQEHLIIVHATHPERGQPASLEFLPMESPTAVNGVKVLVQGTVFARMAPEQKTELVCELQKLQYCVGMCGDGANDCGALKAADVGISLSQAEASVVSPFTSSMASIECVPMVIREGRCSLDTSFSVFKYMALYSLTQFISVLILYTINTNLGDLQFLAIDLVITTTVAVLMSRTGPALVLGRVRPPGALLSVPVLSSLLLQMVLVTGVQLGGYFLTLAQPWFVPLNRTVAAPDNLPNYENTVVFSLSSFQYLILAAAVSKGAPFRRPLYTNERARPVPPRLPAPPPAQAGLQEALQAAGTRAGRAALAAAARRPPEVVQAHGHPRHWNSLPLSHQLDPSPATPPPPPPTSLRLATVYTPPPRPPPPWGSVDYCPLPWTIPRRGGSPQLPSVLLSV

SEQ ID NO: 69 - protein, 376 aa, Homo sapiens
MALTAHPSCLLALLVAGLAQGIRGPLRAQDLGPQPLELKEAFKLFQIQFNRSYLSPEEHAHRLDIFAHNLAQAQRLQEEDLGTAEFGVTPFSDLTEEEFGQLYGYRRAAGGVPSMGREIRSEEPEESVPFSCDWRKVAGAISPIKDQKNCNCCWAMAAAGNIETLWRISFWDFVDVSVQELLDCGRCGDGCHGGFVWDAFITVLNNSGLASEKDYPFQGKVRAHRCHPKKYQKVAWIQDFIMLQNNEHRIAQYLATYGPITVTINMKPLQLYRKGVIKATPTTCDPQLVDHSVLLVGFGSVKSEEGIWAETVSSQSQPQPPHPTPYWILKNSWGAQWGEKGYFRLHRGSNTCGITKFPLTARVQKPDMKPRVSCPP

SEQ ID NO: 70 - protein, 660 aa, Homo sapiens
MEGDGSDPEPPDAGEDSKSENGENAPIYCICRKPDINCFMIGCDNCNEWFHGDCIRITEKMAKAIREWYCRECREKDPKLEIRYRHKKSRERDGNERDSSEPRDEGGGRKRPVPDPDLQRRAGSGTGVGAMLARGSASPHKSSPQPLVATPSQHHQQQQQQIKRSARMCGECEACRRTEDCGHCDFCRDMKKFGGPNKIRQKCRLRQCQLRARESYKYFPSSLSPVTPSESLPRPRRPLPTQQQPQPSQKLGRIREDEGAVASSTVKEPPEATATPEPLSDEDLPLDPDLYQDFCAGAFDDHGLPWMSDTEESPFLDPALRKRAVKVKHVKRREKKSEKKVMERKEERYKRHRQKQKHKDKWKHPERADAKDPASLPQCLGPGCVRPAQPSSKYCSDDCGMKLAANRIYEILPQRIQQWQQSPCIAEEHGKKLLERIRREQQSARTRLQEMERRFHELEAIILRAKQQAVREDEESNEGDSDDTDLQIFCVSCGHPINPRVALRHMERCYAKYESQTSFGSMYPTRIEGATRLFCDVYNPQSKTYCKRLQVLCPEHSRDPKVPADEVCGCPLVRDVFELTGDFCRLPKRQCNRHYCWEKLRRAEVDLERVRVWYKLDELFEQERNVRTAMTNRAGLLALMLHQTIQHDPLTTDLRSSADR

SEQ ID NO: 71 - protein, 208 aa, Homo sapiens
MDPFLVLLHSVSSSLSSSELTELKFLCLGRVGKRKLERVQSGLDLFSMLLEQNDLEPGHTELLRELLASLRRHDLLRRVDDFEAGAAAGAAPGEEDLCAAFNVICDNVGKDWRRLARQLKVSDTKIDSIEDRYPRNLTERVRESLRIWKNTEKENATVAHLVGALRSCQMNLVADLVQEVQQARDLQNRSGAMSPMSWNSDASTSEAS

SEQ ID NO: 72 - protein, 375 aa, Homo sapiens
MDDDIAALVVDNGSGMCKAGFAGDDAPRAVFPSIVGRPRHQGVMVGMGQKDSYVGDEAQSKRGILTLKYPIEHGIVTNWDDMEKIWHHTFYNELRVAPEEHPVLLTEAPLNPKANREKMTQIMFETFNTPAMYVAIQAVLSLYASGRTTGIVMDSGDGVTHTVPIYEGYALPHAILRLDLAGRDLTDYLMKILTERGYSFTTTAEREIVRDIKEKLCYVALDFEQEMATAASSSSLEKSYELPDGQVITIGNERFRCPEALFQPSFLGMESCGIHETTFNSIMKCDVDIRKDLYANTVLSGGTTMYPGIADRMQKEITALAPSTMKIKIIAPPERKYSVWIGGSILASLSTFQQMWISKQEYDESGPSIVHRKCF

SEQ ID NO: 73 - protein, 1093 aa, Homo sapiens
MKEMVGGCCVCSDERGWAENPLVYCDGHACSVAVHQACYGIVQVPTGPWFCRKCESQERAARVRCELCPHKDGALKRTDNGGWAHVVCALYIPEVQFANVLTMEPIVLQYVPHDRFNKTCYICEEQGRESKAASGACMTCNRHGCRQAFHVTCAQMAGLLCEEEVLEVDNVKYCGYCKYHFSKMKTSRHSSGGGGGGAGGGGGSMGGGGSGFISGRRSRSASPSTQQEKHPTHHERGQKKSRKDKERLKQKHKKRPESPPSILTPPVVPTADKVSSSASSSSHHEASTQETSESSRESKGKKSSSHSLSHKGKKLSSGKGVSSFTSASSSSSSSSSSSGGPFQPAVSSLQSSPDFSAFPKLEQPEEDKYSKPTAPAPSAPPSPSAPEPPKADLFEQKVVFSGFGPIMRFSTTTSSSGRARAPSPGDYKSPHVTGSGASAGTHKRMPALSATPVPADETPETGLKEKKHKASKRSRHGPGRPKGSRNKEGTGGPAAPSLPSAQLAGFTATAASPFSGGSLVSSGLGGLSSRTFGPSGSLPSLSLESPLLGAGIYTSNKDPISHSGGMLRAVCSTPLSSSLLGPPGTSALPRLSRSPFTSTLPSSSASISTTQVFSLAGSTFSLPSTHIFGTPMGAVNPLLSQAESSHTEPDLEDCSFRCRGTSPQESLSSMSPISSLPALFDQTASAPCGGGQLDPAAPGTTNMEQLLEKQGDGEAGVNIVEMLKALHALQKENQRLQEQILSLTAKKERLQILNVQLSVPFPALPAALPAANGPVPGPYGLPPQAGSSDSLSTSKSPPGKSSLGLDNSLSTSSEDPHSGCPSRSSSSLSFHSTPPPLPLLQQSPATLPLALPGAPAPLPPQPQNGLGRAPGAAGLGAMPMAEGLLGGLAGSGGLPLNGLLGGLNGAAAPNPASLSQAGGAPTLQLPGCLNSLTEQQRHLLQQQEQQLQQLQQLLASPQLTPEHQTVVYQMIQQIQQKRELQRLQMAGGSQLPMASLLAGSSTPLLSAGTPGLLPTASAPPLLPAGALVAPSLGNNTSLMAAAAAAAAVAAAGGPPVLTAQTNPFLSLSGAEGSGGGPKGGTADKGASANQEKG

SEQ ID NO: 74 - protein, 418 aa, Homo sapiens
MGDKGTRVFKKASPNGKLTVYLGKRDFVDHIDLVDPVDGVVLVDPEYLKERRVYVTLTCAFRYGREDLDVLGLTFRKDLFVANVQSFPPAPEDKKPLTRLQERLIKKLGEHAYPFTFEIPPNLPCSVTLQPGPEDTGKACGVDYEVKAFCAENLEEKIHKRNSVRLVIRKVQYAPERPGPQPTAETTRQFLMSDKPLHLEASLDKEIYYHGEPISVNVHVTNNTNKTVKKIKISVRQYADICLFNTAQYKCPVAMEEADDTVAPSSTFCKVYTLTPFLANNREKRGLALDGKLKHEDTNLASSTLLREGANREILGIIVSYKVKVKLVVSRGGLLGDLASSDVAVELPFTLMHPKPKEEPPHREVPENETPVDTNLIELDTNDDDIVFEDFARQRLKGMKDDKEEEEDGTGSPQLNNR

SEQ ID NO: 75 - protein, 702 aa, Homo sapiens
MESPSAPPHRWCIPWQRLLLTASLLTFWNPPTTAKLTIESTPFNVAEGKEVLLLVHNLPQHLFGYSWYKGERVDGNRQIIGYVIGTQQATPGPAYSGREIIYPNASLLIQNIIQNDTGFYTLHVIKSDLVNEEATGQFRVYPELPKPSISSNNSKPVEDKDAVAFTCEPETQDATYLWWVNNQSLPVSPRLQLSNGNRTLTLFNVTRNDTASYKCETQNPVSARRSDSVILNVLYGPDAPTISPLNTSYRSGENLNLSCHAASNPPAQYSWFVNGTFQQSTQELFIPNITVNNSGSYTCQAHNSDTGLNRTTVTTITVYAEPPKPFITSNNSNPVEDEDAVALTCEPEIQNTTYLWWVNNQSLPVSPRLQLSNDNRTLTLLSVTRNDVGPYECGIQNELSVDHSDPVILNVLYGPDDPTISPSYTYYRPGVNLSLSCHAASNPPAQYSWLIDGNIQQHTQELFISNITEKNSGLYTCQANNSASGHSRTTVKTITVSAELPKPSISSNNSKPVEDKDAVAFTCEPEAQNTTYLWWVNGQSLPVSPRLQLSNGNRTLTLFNVTRNDARAYVCGIQNSVSANRSDPVTLDVLYGPDTPIISPPDSSYLSGANLNLSCHSASNPSPQYSWRINGIPQQHTQVLFIAKITPNNNGTYACFVSNLATGRNNSIVKSITVSASGTSPGLSAGATVGIMIGVLVGVALI

SEQ ID NO: 76 - protein, 483 aa, Homo sapiens
MSGGGPSGGGPGGSGRARTSSFAEPGGGGGGGGGGPGGSASGPGGTGGGKASVGAMGGGVGASSSGGGPGGSGGGGSGGPGAGTSFPPPGVKLGRDSGKVTTVVATLGQGPERSQEVAYTDIKVIGNGSFGVVYQARLAETRELVAIKKVLQDKRFKNRELQIMRKLDHCNIVRLRYFFYSSGEKKDELYLNLVLEYVPETVYRVARHFTKAKLTIPILYVKVYMYQLFRSLAYIHSQGVCHRDIKPQNLLVDPDTAVLKLCDFGSAKQLVRGEPNVSYICSRYYRAPELIFGATDYTSSIDVWSAGCVLAELLLGQPIFPGDSGVDQLVEIIKVLGTPTREQIREMNPNYTEFKFPQIKAHPWTKVFKSRTPPEAIALCSSLLEYTPSSRLSPLEACAHSFFDELRCLGTQLPNNRPLPPLFNFSAGELSIQPSLNAILIPPHLRSPAGTTTLTPSSQALTETPTSSDWQSTDATPTLTNSS

SEQ ID NO: 77 - protein, 482 aa, Homo sapiens
MAQTQGTRRKVCYYYDGDVGNYYYGQGHPMKPHRIRMTHNLLLNYGLYRKMEIYRPHKANAEEMTKYHSDDYIKFLRSIRPDNMSEYSKQMQRFNVGEDCPVFDGLFEFCQLSTGGSVASAVKLNKQQTDIAVNWAGGLHHAKKSEASGFCYVNDIVLAILELLKYHQRVLYIDIDIHHGDGVEEAFYTTDRVMTVSFHKYGEYFPGTGDLRDIGAGKGKYYAVNYPLRDGIDDESYEAIFKPVMSKVMEMFQPSAVVLQCGSDSLSGDRLGCFNLTIKGHAKCVEFVKSFNLPMLMLGGGGYTIRNVARCWTYETAVALDTEIPNELPYNDYFEYFGPDFKLHISPSNMTNQNTNEYLEKIKQRLFENLRMLPHAPGVQMQAIPEDAIPEESGDEDEDDPDKRISICSSDKRIACEEEFSDSEEEGEGGRKNSSNFKKAKRVKTEDEKEKDPEEKKEVTEEEKTKEEKPEAKGVKEEVKLA

SEQ ID NO: 78 - protein, 1609 aa, Homo sapiens
MRGSHRAAPALRPRGRLWPVLAVLAAAAAAGCAQAAMDECTDEGGRPQRCMPEFVNAAFNVTVVATNTCGTPPEEYCVQTGVTGVTKSCHLCDAGQPHLQHGAAFLTDYNNQADTTWWQSQTMLAGVQYPSSINLTLHLGKAFDITYVRLKFHTSRPESFAIYKRTREDGPWIPYQYYSGSCENTYSKANRGFIRTGGDEQQALCTDEFSDISPLTGGNVAFSTLEGRPSAYNFDNSPVLQEWVTATDIRVTLNRLNTFGDEVFNDPKVLKSYYYAISDFAVGGRCKCNGHASECMKNEFDKLVCNCKHNTYGVDCEKCLPFFNDRPWRRATAESASECLPCDCNGRSQECYFDPELYRSTGHGGHCTNCQDNTDGAHCERCRENFFRLGNNEACSSCHCSPVGSLSTQCDSYGRCSCKPGVMGDKCDRCQPGFHSLTEAGCRPCSCDPSGSIDECNIETGRCVCKDNVEGFNCERCKPGFFNLESSNPRGCTPCFCFGHSSVCTNAVGYSVYSISSTFQIDEDGWRAEQRDGSEASLEWSSERQDIAVISDSYFPRYFIAPAKFLGKQVLSYGQNLSFSFRVDRRDTRLSAEDLVLEGAGLRVSVPLIAQGNSYPSETTVKYVFRLHEATDYPWRPALTPFEFQKLLNNLTSIKIRGTYSERSAGYLDDVTLASARPGPGVPATWVESCTCPVGYGGQFCEMCLSGYRRETPNLGPYSPCVLCACNGHSETCDPETGVCNCRDNTAGPHCEKCSDGYYGDSTAGTSSDCQPCPCPGGSSCAVVPKTKEVVCTNCPTGTTGKRCELCDDGYFGDPLGRNGPVRLCRLCQCSDNIDPNAVGNCNRLTGECLKCIYNTAGFYCDRCKDGFFGNPLAPNPADKCKACNCNLYGTMKQQSSCNPVTGQCECLPHVTGQDCGACDPGFYNLQSGQGCERCDCHALGSTNGQCDIRTGQCECQPGITGQHCERCEVNHFGFGPEGCKPCDCHPEGSLSLQCKDDGRCECREGFVGNRCDQCEENYFYNRSWPGCQECPACYRLVKDKVADHRVKLQELESLIANLGTGDEMVTDQAFEDRLKEAEREVMDLLREAQDVKDVDQNLMDRLQRVNNTLSSQISRLQNIRNTIEETGNLAEQARAHVENTERLIEIASRELEKAKVAAANVSVTQPESTGDPNNMTLLAEEARKLAERHKQEADDIVRVAKTANDTSTEAYNLLLRTLAGENQTAFEIEELNRKYEQAKNISQDLEKQAARVHEEAKRAGDKAVEIYASVAQLSPLDSETLENEANNIKMEAENLEQLIDQKLKDYEDLREDMRGKELEVKNLLEKGKTEQQTADQLLARADAAKALAEEAAKKGRDTLQEANDILNNLKDFDRRVNDNKTAAEEALRKIPAINQTITEANEKTREAQQALGSAAADATEAKNKAHEAERIASAVQKNATSTKAEAERTFAEVTDLDNEVNNMLKQLQEAEKELKRKQDDADQDMMMAGMASQAAQEAEINARKAKNSVTSLLSIINDLLEQLGQLDTVDLNKLNEIEGTLNKAKDEMKVSDLDRKVSDLENEAKKQEAAIMDYNRDIEEIMKDIRNLEDIRKTLPSGCFNTPSIEKP

SEQ ID NO: 79 - protein, 934 aa, Homo sapiens [sequence omitted]

SEQ ID NO: 80 - protein, 657 aa, Homo sapiens
MRRAVCFPALCLLLNLHAAGCFSGNNDHFLAINQKKSGKPVFIYKHSQDIEKSLDIAPQKIYRHSYHSSSEAQVSKRHQIVNSAFPRPAYDPSLNLLAMDGQDLEVENLPIPAANVIVVTLQMDVNKLNITLLRIFRQGVAAALGLLPQQVHINRLIGKKNSIELFVSPINRKTGISDALPSEEVLRSLNINVLHQSLSQFGITEVSPEKNVLQGQHEADKIWSKEGFYAVVIFLSIFVIIVTCLMILYRLKERFQLSLRQDKEKNQEIHLSPITLQPALSEAKTVHSMVQPEQAPKVLNVVVDPQGRGAPEIKATTATSVCPSPFKMKPIGLQERRGSNVSLTLDMSSLGNIEPFVSIPTPREKVAMEYLQSASRILTRSQLRDVVASSHLLQSEFMEIPMNFVDPKEIDIPRHGTKNRYKTILPNPLSRVCLRPKNVTDSLSTYINANYIRGYSGKEKAFIATQGPMINTVDDFWQMVWQEDSPVIVMITKLKEKNEKCVLYWPEKRGIYGKVEVLVISVNECDNYTIRNLVLKQGSHTQHVKHYWYTSWPDHKTPDSAQPLLQLMLDVEEDRLASQGRGPVVVHCSAGIGRTGCFIATSIGCQQLKEEGVVDALSIVCQLRMDRGGMVQTSEQYEFVHHALCLYESRLSAETVQ

SEQ ID NO: 81 - protein, 657 aa, Homo sapiens; identical to SEQ ID NO: 80

SEQ ID NO: 82 - protein, 331 aa, Homo sapiens
MEVTGDAGVPESGEIRTLKPCLLRRNYSREQHGVAASCLEDLRSKACDILAIDKSLTPVTLVLAEDGTIVDDDDYFLCLPSNTKFVALASNEKWAYNNSDGGTAWISQESFDVDETDSGAGLKWKNVARQLKEDLSSIILLSEEDLQMLVDAPCSDLAQELRQSCATVQRLQHTLQQVLDQREEVRQSKQLLQLYLQALEKEGSLLSKQEESKAAFGEEVDAVDTGISRETSSDVALASHILTALREKQAPELSLSSQDLELVTKEDPKALAVALNWDIKKTETVQEACERELALRLQQTQSLHSLRSISASKASPPGDLQNPKRARQDPT

SEQ ID NO: 83 - protein, 1137 aa, Homo sapiens
MSRRKPASGGLAASSSAPARQAVLSRFFQSTGSLKSTSSSTGAADQVDPGAAAAAAAAAAAAPPAPPAPAFPPQLPPHIATEIDRRKKRPLENDGPVKKKVKKVQQKEGGSDLGMSGNSEPKKCLRTRNVSKSLEKLKEFCCDSALPQSRVQTESLQERFAVLPKCTDFDDISLLHAKNAVSSEDSKRQINQKDTTLFDLSQFGSSNTSHENLQKTASKSANKRSKSIYTPLELQYIEMKQQHKDAVLCVECGYKYRFFGEDAEIAARELNIYCHLDHNFMTASIPTHRLFVHVRRLVAKGYKVGVVKQTETAALKAIGDNRSSLFSRKLTALYTKSTLIGEDVNPLIKLDDAVNVDEIMTDTSTSYLLCISENKENVRDKKKGNIFIGIVGVQPATGEVVFDSFQDSASRSELETRMSSLQPVELLLPSALSEQTEALIHRATSVSVQDDRIRVERMDNIYFEYSHAFQAVTEFYAKDTVDIKGSQIISGIVNLEKPVICSLAAIIKYLKEFNLEKMLSKPENFKQLSSKMEFMTINGTTLRNLEILQNQTDMKTKGSLLWVLDHTKTSFGRRKLKKWVTQPLLKLREINARLDAVSEVLHSESSVFGQIENHLRKLPDIERGLCSIYHKKCSTQEFFLIVKTLYHLKSEFQAIIPAVNSHIQSDLLRTVILEIPELLSPVEHYLKILNEQAAKVGDKTELFKDLSDFPLIKKRKDEIQGVIDEIRMHLQEIRKILKNPSAQYVTVSGQEFMIEIKNSAVSCIPTDWVKVGSTKAVSRFHSPFIVENYRHLNQLREQLVLDCSAEWLDFLEKFSEHYHSLCKAVHHLATVDCIFSLAKVAKQGDYCRPTVQEERKIVIKNGRHPVIDVLLGEQDQYVPNNTDLSEDSERVMIITGPNMGGKSSYIKQVALITIMAQIGSYVPAEEATIGIVDGIFTRMGAADNIYKGQSTFMEELTDTAEIIRKATSQSLVILDELGRGTSTHDGIAIAYATLEYFIRDVKSLTLFVTHYPPVCELEKNYSHQVGNYHMGFLVSEDESKLDPGAAEQVPDFVTFLYQITRGIAARSYGLNVAKLADVPGEILKKAAHKSKELEGLINTKRKRLKYFAKLWTMHNAQDLQKWTEEFNMEETQTSLLH

SEQ ID NO: 84 - protein, 2639 aa, Homo sapiens
MSSSHSRAGQSAAGAAPGGGVDTRDAEMPATEKDLAEDAPWKKIQQNTFTRWCNEHLKCVSKRIANLQTDLSDGLRLIALLEVLSQKKMHRKHNQRPTFRQMQLENVSVALEFLDRESIKLVSIDSKAIVDGNLKLILGLIWTLILHYSISMPMWDEEEDEEAKKQTPKQRLLGWIQNKLPQLPITNFSRDWQSGRALGALVDSCAPGLCPDWDSWDASKPVTNAREAMQQADDWLGIPQVITPEEIVDPNVDEHSVMTYLSQFPKAKLKPGAPLRPKLNPKKARAYGPGIEPTGNMVKKRAEFTVETRSAGQGEVLVYVEDPAGHQEEAKVTANNDKNRTFSVWYVPEVTGTHKVTVLFAGQHIAKSPFEVYVDKSQGDASKVTAQGPGLEPSGNIANKTTYFEIFTAGAGTGEVEVVIQDPMGQKGTVEPQLEARGDSTYRCSYQPTMEGVHTVHVTFAGVPIPRSPYTVTVGQACNPSACRAVGRGLQPKGVRVKETADFKVYTKGAGSGELKVTVKGPKGEERVKQKDLGDGVYGFEYYPMVPGTYIVTITWGGQNIGRSPFEVKVGTECGNQKVRAWGPGLEGGVVGKSADFVVEAIGDDVGTLGFSVEGPSQAKIECDDKGDGSCDVRYWPQEAGEYAVHVLCNSEDIRLSPFMADIRDAPQDFHPDRVKARGPGLEKTGVAVNKPAEFTVDAKHGGKAPLRVQVQDNEGCPVEALVKDNGNGTYSCSYVPRKPVKHTAMVSWGGVSIPNSPFRVNVGAGSHPNKVKVYGPGVAKTGLKAHEPTYFTVDCAEAGQGDVSIGIKCAPGVVGPAEADIDFDIIRNDNDTFTVKYTPRGAGSYTIMVLFADQATPTSPIRVKVEPSHDASKVKAEGPGLSRTGVELGKPTHFTVNAKAAGKGKLDVQFSGLTKGDAVRDVDIIDHHDNTYTVKYTPVQQGPVGVNVTYGGDPIPKSPFSVAVSPSLDLSKIKVSGLGEKVDVGKDQEFTVKSKGAGGQGKVASKIVGPSGAAVPCKVEPGLGADNSVVRFLPREEGPYEVEVTYDGVPVPGSPFPLEAVAPTKPSKVKAFGPGLQGGSAGSPARFTIDTKGAGTGGLGLTVEGPCEAQLECLDNGDGTCSVSYVPTEPGDYNINILFADTHIPGSPFKAHVVPCFDASKVKCSGPGLERATAGEVGQFQVDCSSAGSAELTIEICSEAGLPAEVYIQDHGDGTHTITYIPLCPGAYTVTIKYGGQPVPNFPSKLQVEPAVDTSGVQCYGPGIEGQGVFREATTEFSVDARALTQTGGPHVKARVANPSGNLTETYVQDRGDGMYKVEYTPYEEGLHSVDVTYDGSPVPSSPFQVPVTEGCDPSRVRVHGPGIQSGTTNKPNKFTVETRGAGTGGLGLAVEGPSEAKMSCMDNKDGSCSVEYIPYEAGTYSLNVTYGGHQVPGSPFKVPVHDVTDASKVKCSGPGLSPGMVRANLPQSFQVDTSKAGVAPLQVKVQGPKGLVEPVDVVDNADGTQTVNYVPSREGPYSISVLYGDEEVPRSPFKVKVLPTHDASKVKASGPGLNTTGVPASLPVEFTIDAKDAGEGLLAVQITDPEGKPKKTHIQDNHDGTYTVAYVPDVTGRYTILIKYGGDEIPFSPYRVRAVPTGDASKCTVTGAGIGPTIQIGEETVITVDTKAAGKGKVTCTVCTPDGSEVDVDVVENEDGTFDIFYTAPQPGKYVICVRFGGEHVPNSPFQVTALAGDQPSVQPPLRSQQLAPQYTYAQGGQQTWAPERPLVGVNGLDVTSLRPFDLVIPFTIKKGEITGEVRMPSGKVAQPTITDNKDGTVTVRYAPSEAGLHEMDIRYDNMHIPGSPLQFYVDYVNCGHVTAYGPGLTHGVVNKPATFTVNTKDAGEGGLSLAIEGPSKAEISCTDNQDGTCSVSYLPVLPGDYSILVKYNEQHVPGSPFTARVTGDDSMRMSHLKVGSAADIPINISETDLSLLTATVVPPSGREEPCLLKRLRNGHVGISFVPKETGEHLVHVKKNGQHVASSPIPVVISQSEIGDASRVRVSGQGLHEGHTFEPAEFIIDTRDAGYGGLSLSIEGPSKVDINTEDLEDGTCRVTYCPTEPGNYIINIKFADQHVPGSPFSVKVTGEGRVKESITRRRRAPSVANVGSHCDLSLKIPEISIQDMTAQVTSPSGKTHEAEIVEGENHTYCIRFVPAEMGTHTVSVKYKGQHVPGSPFQFTVGPLGEGGAHKVRAGGPGLERAEAGVPAEFSIWTREAGAGGLAIAVEGPSKAEISFEDRKDGSCGVAYVVQEPGDYEVSVKFNEEHIPDSPFVVPVASPSGDARRLTVSSLQESGLKVNQPASFAVSLNGAKGAIDAKVHSPSGALEECYVTEIDQDKYAVRFIPRENGVYLIDVKFNGTHIPGSPFKIRVGEPGHGGDPGLVSAYGAGLEGGVTGNPAEFVVNTSNAGAGALSVTIDGPSKVKMDCQECPEGYRVTYTPMAPGSYLISIKYGGPYHIGGSPFKAKVTGPRLVSNHSLHETSSVFVDSLTKATCAPQHGAPGPGPADASKVVAKGLGLSKAYVGQKSSFTVDCSKAGNNMLLVGVHGPRTPCEEILVKHVGSRLYSVSYLLKDKGEYTLVVKWGDEHIPGSPYRVVVP

SEQ ID NO: 85 - protein, 433 aa, Homo sapiens
MALRVTRNSKINAENKAKINMAGAKRVPTAPAATSKPGLRPRTALGDIGNKVSEQLQAKMPMKKEAKPSATGKVIDKKLPKPLEKVPMLVPVPVSEPVPEPEPEPEPEPVKEEKLSPEPILVDTASPSPMETSGCAPAEEDLCQAFSDVILAVNDVDAEDGADPNLCSEYVKDIYAYLRQLEEEQAVRPKYLLGREVTGNMRAILIDWLVQVQMKFRLLQETMYMTVSIIDRFMQNNCVPKKMLQLVGVTAMFIASKYEEMYPPEIGDFAFVTDNTYTKHQIRQMEMKILRALNFGLGRPLPLHFLRRASKIGEVDVEQHTLAKYLMELTMLDYDMVHFPPSQIAAGAFCLALKILDNGEWTPTLQHYLSYTEESLLPVMQHLAKNVVMVNQGLTKHMTVKNKYATSKHAKISTLPQLNSALVQDLAKAVAKV

SEQ ID NO: 86 - protein, 583 aa, Homo sapiens
MDLLPPKPKYNPLRNESLSSLEEGASGSTPPEELPSPSASSLGPILPPLPGDDSPTTLCSFFPRMSNLRLANPAGGRPGSKGEPGRAADDGEGIVGAAMPDSGPLPLLQDMNKLSGGGGRRTRVEGGQLGGEEWTRHGSFVNKPTRGWLHPNDKVMGPGVSYLVRYMGCVEVLQSMRALDFNTRTQVTREAISLVCEAVPGAKGATRRRKPCSRPLSSILGRSNLKFAGMPITLTVSTSSLNLMAADCKQIIANHHMQSISFASGGDPDTAEYVAYVAKDPVNQRACHILECPEGLAQDVISTIGQAFELRFKQYLRNPPKLVTPHDRMAGFDGSAWDEEEEEPPDHQYYNDFPGKEPPLGGVVDMRLREGAAPGAARPTAPNAQTPSHLGATLPVGQPVGGDPEVRKQMPPPPPCPGRELFDDPSYVNVQNLDKARQAVGGAGPPNPAINGSAPRDLFDMKPFEDALRVPPPPQSVSMAEQLRGEPWFHGKLSRREAEALLQLNGDFLVRESTTTPGQYVLTGLQSGQPKHLLLVDPEGVVRTKDHRFESVSHLISYHMDNHLPIISAGSELCLQQPVERKL

SEQ ID NO: 87 - protein, 417 aa, Homo sapiens
MLLSVPLLLGLLGLAVAEPAVYFKEQFLDGDGWTSRWIESKHKSDFGKFVLSSGKFYGDEEKDKGLQTSQDARFYALSASFEPFSNKGQTLVVQFTVKHEQNIDCGGGYVKLFPNSLDQTDMHGDSEYNIMFGPDICGPGTKKVHVIFNYKGKNVLINKDIRCKDDEFTHLYTLIVRPDNTYEVKIDNSQVESGSLEDDWDFLPPKKIKDPDASKPEDWDERAKIDDPTDSKPEDWDKPEHIPDPDAKKPEDWDEEMDGEWEPPVIQNPEYKGEWKPRQIDNPDYKGTWIHPEIDNPEYSPDPSIYAYDNFGVLGLDLWQVKSGTIFDNFLITNDEAYAEEFGNETWGVTKAAEKQMKDKQDEEQRLKEEEEDKKRKEEEEAEDKEDDEDKDEDEEDEEDKEEDEEEDVPGQAKDEL

SEQ ID NO: 88 - protein, 576 aa, Homo sapiens
MELENIVANTVLLKAREGGGGNRKGKSKKWRQMLQFPHISQCEELRLSLERDYHSLCERQPIGRLLFREFCATRPELSRCVAFLDGVAEYEVTPDDKRKACGRQLTQNFLSHTGPDLIPEVPRQLVTNCTQRLEQGPCKDLFQELTRLTHEYLSVAPFADYLDSIYFNRFLQWKWLERQPVTKNTFRQYRVLGKGGFGEVCACQVRATGKMYACKKLEKKRIKKRKGEAMALNEKQILEKVNSRFVVSLAYAYETKDALCLVLTLMNGGDLKFHIYHMGQAGFPEARAVFYAAEICCGLEDLHRERIVYRDLKPENILLDDHGHIRISDLGLAVHVPEGQTIKGRVGTVGYMAPEVVKNERYTFSPDWWALGCLLYEMIAGQSPFQQRKKKIKREEVERLVKEVPEEYSERFSPQARSLCSQLLCKDPAERLGCRGGSAREVKEHPLFKKLNFKRLGAGMLEPPFKPDPQAIYCKDVLDIEQFSTVKGVELEPTDQDFYQKFATGSVPIPWQNEMVETECFQELNVFGLDGSVPPDLDWKGQPPAPPKKGLLQRLFSRQDCCGNCSDSEEELPTRL

SEQ ID NO: 89 - protein, 355 aa, Homo sapiens
MGCTVSAEDKAAAERSKMIDKNLREDGEKAAREVKLLLLGAGESGKSTIVKQMKIIHEDGYSEEECRQYRAVVYSNTIQSIMAIVKAMGNLQIDFADPSRADDARQLFALSCTAEEQGVLPDDLSGVIRRLWADHGVQACFGRSREYQLNDSAAYYLNDLERIAQSDYIPTQQDVLRTRVKTTGIVETHFTFKDLHFKMFDVGGQRSERKKWIHCFEGVTAIIFCVALSAYDLVLAEDEEMNRMHESMKLFDSICNNKWFTDTSIILFLNKKDLFEEKITHSPLTICFPEYTGANKYDEAASYIQSKFEDLNKRKDTKEIYTHFTCATDTKNVQFVFDAVTDVIIKNNLKDCGLF

SEQ ID NO: 90 - protein, 822 aa, Homo sapiens [sequence omitted]

SEQ ID NO: 91 - protein, 272 aa, Homo sapiens
MRRSRSSAAAKLRGQKRSGASAAPAASAAAALAPSATRTRRSASQAGSKSQAVEKPPSEKPRLRRSSPRAQEEGPGEPPPPELALLPPPPPPPPTPATPTSSASNLDLGEQRERWETFQKRQKLTSEGAAKLLLDTFEYQGLVKHTGGCHCGAVRFEVWASADLHIFDCNCSICKKKQNRHFIVPASRFKLLKGAEHITTYTFNTHKAQHTFCKRCGVQSFYTPRSNPGGFGIAPHCLDEGTVRSMVTEEFNGSDWEKAMKEHKTIKNMSKE

SEQ ID NO: 92 - protein, 1080 aa, Homo sapiens
MKGTRAIGSVPERSPAGVDLSLTGLPPPVSRRPGSAATTKPIVRSVSVVTGSEQKRKVLEATGPGGSQAINNLRRSNSTTQVSQPRSGSPRPTEPTDFLMLFEGSPSGKKRPASLSTAPSEKGATWNVLDDQPRGFTLPSNARSSSALDSPAGPRRKECTVALAPNFTANNRSNKGAVGNCVTTMVHNRYTPSERAPPLKSSNQTAPSLNNIIKAATCEGSESSGFGKLPKNVSSATHSARNNTGGSTGLPRRKEVTEEEAERFIHQVNQATVTIQRWYRHQVQRRGAGAARLEHLLQAKREEQRQRSGEGTLLDLHQQKEAARRKAREEKARQARRAAIQELQQKRALRAQKASTAERGPPENPRETRVPGMRQPAQELSPTPGGTAHQALKANNTGGGLPAAGPGDRCLPTSDSSPEPQQPPEDRTQDVLAQDAAGDNLEMMAPSRGSAKSRGPLEELLHTLQLLEKEPDVLPRPRTHHRGRYAWASEEDDASSLTADNLEKFGKLSAFPEPPEDGTLLSEAKLQSIMSFLDEMEKSGQDQLDSQQEGWVPEAGPGPLELGSEVSTSVMRLKLEVEEKKQAMLLLQRALAQQRDLTARRVKETEKALSRQLQRQREHYEATIQRHLAFIDQLIEDKKVLSEKCEAVVAELKQEDQRCTERVAQAQAQHELEIKKLKELMSATEKARREKWISEKTKKIKEVTVRGLEPEIQKLIARHKQEVRRLKSLHEAELLQSDERASQRCLRQAEELREQLEREKEALGQQERERARQRFQQHLEQEQWALQQQRQRLYSEVAEERERLGQQAARQRAELEELRQQLEESSSALTRALRAEFEKGREEQERRHQMELNTLKQQLELERQAWEAGRTRKEEAWLLNREQELREEIRKGRDKEIELVIHRLEADMALAKEESEKAAESRIKRLRDKYEAELSELEQSERKLQERCSELKGQLGEAEGENLRLQGLVRQKERALEDAQAVNEQLSSERSNLAQVIRQEFEDRLAASEEETRQAKAELATLQARQQLELEEVHRRVKTALARKEEAVSSLRTQHEAAVKRADHLEELLEQHRRPTPSTK

SEQ ID NO: 93 - protein, 1030 aa, Homo sapiens
MKMADAKQKRNEQLKRWIGSETDLEPPVVKRQKTKVKFDDGAVFLAACSSGDTDEVLKLLHRGADINYANVDGLTALHQACIDDNVDMVKFLVENGANINQPDNEGWIPLHAAASCGYLDIAEFLIGQGAHVGAVNSEGDTPLDIAEEEAMEELLQNEVNRQGVDIEAARKEEERIMLRDARQWLNSGHINDVRHAKSGGTALHVAAAKGYTEVLKLLIQAGYDVNIKDYDGWTPLHAAAHWGKEEACRILVDNLCDMEMVNKVGQTAFDVADEDILGYLEELQKKQNLLHSEKRDKKSPLIESTANMDNNQSQKTFKNKETLIIEPEKNASRIESLEQEKVDEEEEGKKDESSCSSEEDEEDDSESEAETDKTKPLASVTNANTSSTQAAPVAVTTPTVSSGQATPTSPIKKFPTTATKISPKEEERKDESPATWRLGLRKTGSYGALAEITASKEGQKEKDTAGVTRSASSPRLSSSLDNKEKEKDSKGTRLAYVAPTIPRRLASTSDIEEKENRDSSSLRTSSSYTRRKWEDDLKKNSSVNEGSTYHKSCSFGRRQDDLISSSVPSTTSTPTVTSAAGLQKSLLSSTSTTTKITTGSSSAGTQSSTSNRLWAEDSTEKEKDSVPTAVTIPVAPTVVNAAASTTTLTTTTAGTVSSTTEVRERRRSYLTPVRDEESESQRKARSRQARQSRRSTQGVTLTDLQEAEKTIGRSRSTRTREQENEEKEKEEKEKQDKEKQEEKKESETSREDEYKQKYSRTYDETYQRYRPVSTSSSTTPSSSLSTMSSSLYASSQLNRPNSLVGITSAYSRGITKENEREGEKREEEKEGEDKSQPKSIRERRRPREKRRSTGVSFWTQDSDENEQEQQSDTEEGSNKKETQTDSISRYETSSTSAGDRYDSLLGRSGSYSYLEERKPYSSRLEKDDSTDFKKLYEQILAENEKLKAQLHDTNMELTDLKLQLEKATQRQERFADRSLLEMEKRERRALERRISEMEEELKMLPDLKADNQRLKDENGALIRVISKLSK

SEQ ID NO: 94 - protein, 522 aa, Homo sapiens
MKSQGQHWYSSSDKNCKVSFREKLLIIDSNLGVQDVENLKFLCIGLVPNKKLEKSSSASDVFEHLLAEDLLSEEDPFFLAELLYIIRQKKLLQHLNCTKEEVERLLPTRQRVSLFRNLLYELSEGIDSENLKDMIFLLKDSLPKTEMTSLSFLAFLEKQGKIDEDNLTCLEDLCKTVVPKLLRNIEKYKREKAIQIVTPPVDKEAESYQGEEELVSQTDVKTFLEALPQESWQNKHAGSNGNRATNGAPSLVSRGMQGASANTLNSETSTKRAAVYRMNRNHRGLCVIVNNHSFTSLKDRQGTHKDAEILSHVFQWLGFTVHIHNNVTKVEMEMVLQKQKCNPAHADGDCFVFCILTHGRFGAVYSSDEALIPIREIMSHFTALQCPRLAEKPKLFFIQACQGEEIQPSVSIEADALNPEQAPTSLQDSIPAEADFLLGLATVPGYVSFRHVEEGSWYIQSLCNHLKKLVPRHEDILSILTAVNDDVSRRVDKQGTKKQMPQPAFTLRKKLVFPVPLDALSL

SEQ ID NO: 95 - protein, 655 aa, Homo sapiens
MAEAPQVVEIDPDFEPLPRPRSCTWPLPRPEFSQSNSATSSPAPSGSAAANPDAAAGLPSASAAAVSADFMSNLSLLEESEDFPQAPGSVAAAVAAAAAAAATGGLCGDFQGPEAGCLHPAPPQPPPPGPLSQHPPVPPAAAGPLAGQPRKSSSSRRNAWGNLSYADLITKAIESSAEKRLTLSQIYEWMVKSVPYFKDKGDSNSSAGWKNSIRHNLSLHSKFIRVQNEGTGKSSWWMLNPEGGKSGKSPRRRAASMDNNSKFAKSRSRAAKKKASLQSGQEGAGDSPGSQFSKWPASPGSHSNDDFDNWSTFRPRTSSNASTISGRLSPIMTEQDDLGEGDVHSMVYPPSAAKMASTLPSLSEISNPENMENLLDNLNLLSSPTSLTVSTQSSPGTMMQQTPCYSFAPPNTSLNSPSPNYQKYTYGQSSMSPLPQMPIQTLQDNKSSYGGMSQYNCAPGLLKELLTSDSPPHNDIMTPVDPGVAQPNSRVLGQNVMMGPNSVMSTYGSQASHNKMMNPSSHTHPGHAQQTSAVNGRPLPHTVSTMPHTSGMNRLTQVKTPVQVPLPHPMQMSALGGYSSVSSCNGYGRMGLLHQEKLPSDLDGMFIERLDCDMESIIRNDLMDGDTLDFNFDNVLPNQSFPHSVKTTTHSWVSG

SEQ ID NO: 96 - protein, 1443 aa, Homo sapiens
MYAVYKQAHPPTGLEFSMYCNFFNNSERNLVVAGTSQLYVYRLNRDAEALTKNDRSTEGKAHREKLELAASFSFFGNVMSMASVQLAGAKRDALLLSFKDAKLSVVEYDPGTHDLKTLSLHYFEEPELRDGFVQNVHTPRVRVDPDGRCAAMLVYGTRLVVLPFRRESLAEEHEGLVGEGQRSSFLPSYIIDVRALDEKLLNIIDLQFLHGYYEPTLLILFEPNQTWPGRVAVRQDTCSIVAISLNITQKVHPVIWSLTSLPFDCTQALAVPKPIGGVVVFAVNSLLYLNQSVPPYGVALNSLTTGTTAFPLRTQEGVRITLDCAQATFISYDKMVISLKGGEIYVLTLITDGMRSVRAFHFDKAAASVLTTSMVTMEPGYLFLGSRLGNSLLLKYTEKLQEPPASAVREAADKEEPPSKKKRVDATAGWSAAGKSVPQDEVDEIEVYGSEAQSGTQLATYSFEVCDSILNIGPCANAAVGEPAFLSEEFQNSPEPDLEIVVCSGHGKNGALSVLQKSIRPQVVTTFELPGCYDMWTVIAPVRKEEEDNPKGEGTEQEPSTTPEADDDGRRHGFLILSREDSTMILQTGQEIMELDTSGFATQGPTVFAGNIGDNRYIVQVSPLGIRLLEGVNQLHFIPVDLGAPIVQCAVADPYVVIMSAEGHVTMFLLKSDSYGGRHHRLALHKPPLHHQSKVITLCLYRDLSGMFTTESRLGGARDELGGRSGPEAEGLGSETSPTVDDEEEMLYGDSGSLFSPSKEEARRSSQPPADRDPAPFRAEPTHWCLLVRENGTMEIYQLPDWRLVFLVKNFPVGQRVLVDSSFGQPTTQGEARREEATRQGELPLVKEVLLVALGSRQSRPYLLVHVDQELLIYEAFPHDSQLGQGNLKVRFKKVPHNINFREKKPKPSKKKAEGGGAEEGAGARGRVARFRYFEDIYGYSGVFICGPSPHWLLVTGRGALRLHPMAIDGPVDSFAPFHNVNCPRGFLYFNRQGELRISVLPAYLSYDAPWPVRKIPLRCTAHYVAYHVESKVYAVATSTNTPCARIPRMTGEEKEFETIERDERYIHPQQEAFSIQLISPVSWEAIPNARIELQEWEHVTCMKTVSLRSEETVSGLKGYVAAGTCLMQGEEVTCRGRILIMDVIEVVPEPGQPLTKNKFKVLYEKEQKGPVTALCHCNGHLVSAIGQKIFLWSLRASELTGMAFIDTQLYIHQMISVKNFILAADVMKSISLLRYQEESKTLSLVSRDAKPLEVYSVDFMVDNAQLGFLVSDRDRNLMVYMYLPEAKESFGGMRLLRRADFHVGAHVNTFWRTPCRGATEGLSKKSVVWENKHITWFATLDGGIGLLLPMQEKTYRRLLMLQNALTTMLPHHAGLNPRAFRMLHVDRRTLQNAVRNVLDGELLNRYLYLSTMERSELAKKIGTTPDIILDDLLETDRVTAHF

SEQ ID NO: 97 - protein, 689 aa, Homo sapiens
MADLEAVLADVSYLMAMEKSKATPAARASKKILLPEPSIRSVMQKYLEDRGEVTFEKIFSQKLGYLLFRDFCLNHLEEARPLVEFYEEIKKYEKLETEEERVARSREIFDSYIMKELLACSHPFSKSATEHVQGHLGKKQVPPDLFQPYIEEICQNLRGDVFQKFIESDKFTRFCQWKNVELNIHLTMNDFSVHRIIGRGGFGEVYGCRKADTGKMYAMKCLDKKRIKMKQGETLALNERIMLSLVSTGDCPFIVCMSYAFHTPDKLSFILDLMNGGDLHYHLSQHGVFSEADMRFYAAEIILGLEHMHNRFVVYRDLKPANILLDEHGHVRISDLGLACDFSKKKPHASVGTHGYMAPEVLQKGVAYDSSADWFSLGCMLFKLLRGHSPFRQHKTKDKHEIDRMTLTMAVELPDSFSPELRSLLEGLLQRDVNRRLGCLGRGAQEVKESPFFRSLDWQMVFLQKYPPPLIPPRGEVNAADAFDIGSFDEEDTKGIKLLDSDQELYRNFPLTISERWQQEVAETVFDTINAETDRLEARKKAKNKQLGHEEDYALGKDCIMHGYMSKMGNPFLTQWQRRYFYLFPNRLEWRGEGEAPQSLLTMEEIQSVEETQIKERKCLLLKIRGGKQFILQCDSDPELVQWKKELRDAYREAQQLVQRVPKMKNKPRSPVVELSKVPLVQRGSANGL

SEQ ID NO: 98 - protein, 479 aa, Homo sapiens
MSDVTIVKEGWVQKRGEYIKNWRPRYFLLKTDGSFIGYKEKPQDVDLPYPLNNFSVAKCQLMKTERPKPNTFIIRCLQWTTVIERTFHVDTPEEREEWTEAIQAVADRLQRQEEERMNCSPTSQIDNIGEEEMDASTTHHKRKTMNDFDYLKLLGKGTFGKVILVREKASGKYYAMKILKKEVIIAKDEVAHTLTESRVLKNTRHPFLTSLKYSFQTKDRLCFVMEYVNGGELFFHLSRERVFSEDRTRFYGAEIVSALDYLHSGKIVYRDLKLENLMLDKDGHIKITDFGLCKEGITDAATMKTFCGTPEYLAPEVLEDNDYGRAVDWWGLGVVMYEMMCGRLPFYNQDHEKLFELILMEDIKFPRTLSSDAKSLLSGLLIKDPNKRLGGGPDDAKEIMRHSFFSGVNWQDVYDKKLVPPFKPQVTSETDTRYFDEEFTAQTITITPPEKYDEDGMDCMDNERRPHFPQFSYSASGRE

SEQ ID NO: 99 - protein, 321 aa, Homo sapiens
MAMATKGGTVKAASGFNAMEDAQTLRKAMKGLGTDEDAIISVLAYRNTAQRQEIRTAYKSTIGRDLIDDLKSELSGNFEQVIVGMMTPTVLYDVQELRRAMKGAGTDEGCLIEILASRTPEEIRRISQTYQQQYGRSLEDDIRSDTSFMFQRVLVSLSAGGRDEGNYLDDALVRQDAQDLYEAGEKKWGTDEVKFLTVLCSRNRNHLLHVFDEYKRISQKDIEQSIKSETSGSFEDALLAIVKCMRNKSAYFAEKLYKSMKGLGTDDNTLIRVMVSRAEIDMLDIRAHFKRLYGKSLYSFIKGDTSGDYRKVLLVLCGGDD

SEQ ID NO: 100 - protein, 279 aa, Homo sapiens
MTKNEKKSLNQSLAEWKLFIYNPTTGEFLGRTAKSWGLILLFYLVFYGFLAALFSFTMWVMLQTLNDEVPKYRDQIPSPGLMVFPKPVTALEYTFSRSDPTSYAGYIEDLKKFLKPYTLEEQKNLTVCPDGALFEQKGPVYVACQFPISLLQACSGMNDPDFGYSQGNPCILVKMNRIIGLKPEGVPRIDCVSKNEDIPNVAVYPHNGMIDLKYFPYYGKKLHVGYLQPLVAVQVSFAPNNTGKEVTVECKIDGSANLKSQDDRDKFLGRVMFKITARA

SEQ ID NO: 101 - protein, 1271 aa, Homo sapiens
MVDPVGFAEAWKAQFPDSEPPRMELRSVGDIEQELERCKASIRRLEQEVNQERFRMIYLQTLLAKEKKSYDRQRWGFRRAAQAPDGASEPRASASRPQPAPADGADPPPAEEPEARPDGEGSPGKARPGTARRPGAAASGERDDRGPPASVAALRSNFERIRKGHGQPGADAEKPFYVNVEFHHERGLVKVNDKEVSDRISSLGSQAMQMERKKSQHGAGSSVGDASRPPYRGRSSESSCGVDGDYEDAELNPRFLKDNLIDANGGSRPPWPPLEYQPYQSIYVGGMMEGEGKGPLLRSQSTSEQEKRLTWPRRSYSPRSFEDCGGGYTPDCSSNENLTSSEEDFSSGQSSRVSPSPTTYRMFRDKSRSPSQNSQQSFDSSSPPTPQCHKRHRHCPVVVSEATIVGVRKTGQIWPNDGEGAFHGDADGSFGTPPGYGCAADRAEEQRRHQDGLPYIDDSPSSSPHLSSKGRGSRDALVSGALESTKASELDLEKGLEMRKWVLSGILASEETYLSHLEALLLPMKPLKAAATTSQPVLTSQQIETIFFKVPELYEIHKEFYDGLFPRVQQWSHQQRVGDLFQKLASQLGVYRAFVDNYGVAMEMAEKCCQANAQFAEISENLRARSNKDAKDPTTKNSLETLLYKPVDRVTRSTLVLHDLLKHTPASHPDHPLLQDALRISQNFLSSINEEITPRRQSMTVKKGEHRQLLKDSFMVELVEGARKLRHVFLFTDLLLCTKLKKQSGGKTQQYDCKWYIPLTDLSFQMVDELEAVPNIPLVPDEELDALKIKISQIKNDIQREKRANKGSKATERLKKKLSEQESLLLLMSPSMAFRVHSRNGKSYTFLISSDYERAEWRENIREQQKKCFRSFSLTSVELQMLTNSCVKLQTVHSIPLTINKEDDESPGLYGFLNVIVHSATGFKQSSNLYCTLEVDSFGYFVNKAKTRVYRDTAEPNWNEEFEIELEGSQTLRILCYEKCYNKTKIPKEDGESTDRLMGKGQVQLDPQALQDRDWQRTVIAMNGIEVKLSVKFNSREFSLKRMPSRKQTGVFGVKIAVVTKRERSKVPYIVRQCVEEIERRGMEEVGIYRVSGVATDIQALKAAFDVNNKDVSVMMSEMDVNAIAGTLKLYFRELPEPLFTDEFYPNFAEGIALSDPVAKESCMLNLLLSLPEANLLTFLFLLDHLKRVAEKEAVNKMSLHNLATVFGPTLLRPSEKESKLPANPSQPITMTDSWSLEVMSQVQVLLYFLQLEAIPAPDSKRQSILFSTEV

SEQ ID NO: 102 - protein, 465 aa, Homo sapiens
MRRAAGMEDFSAEEEESWYDQQDLEQDLHLAAELGKTLLERNKELEGSLQQMYSTNEEQVQEIEYLTKQLDTLRHVNEQHAKVYEQLDLTARDLELTNHRLVLESKAAQQKIHGLTETIERLQAQVEELQAQVEQLRGLEQLRVLREKRERRRTIHTFPCLKELCTSPRCKDAFRLHSSSLELGPRPLEQENERLQTLVGALRSQVSQERQRKERAEREYTAVLQEYSELERQLCEMEACRLRVQELEAELLELQQMKQAKTYLLGPDDHLAEALLAPLTQAPEADDPQPGRGDDLGAQDGVSSPAASPGHVVRKSCSDTALNAIVAKDPASRHAGNLTLHANSVRKRGMSILREVDEQYHALLEKYEELLSKCRQHGAGVRHAGVQTSRPISRDSSWRDLRGGEEGQGEVKAGEKSLSQHVEAVDKRLEQSQPEYKALFKEIFSRIQKTKADINATKVKTHSSK

SEQ ID NO: 103 - protein, 267 aa, Homo sapiens
MANCERTFIAIKPDGVQRGLVGEIIKRFEQKGFRLVGLKFMQASEDLLKEHYVDLKDRPFFAGLVKYMHSGPVVAMVWEGLNVVKTGRVMLGETNPADSKPGTIRGDFCIQVGRTMANLERTFIAIKPDGVQRGLVGEIIKRFEQKGFRLVAMKFLRASEEHLKQHYIDLKDRPFFPGLVKYMNSGPVVAMVWEGLNVVKTGRVMLGETNPADSKPGTIRGDFCIQVGRNIIHGSDSVKSAEKEISLWFKPEELVDYKSCAHDWVYE

SEQ ID NO: 104 - protein, 109 aa, Homo sapiens
MKFISTSLLLMLLVSSLSPVQGVLEVYYTSLRCRCVQESSVFIPRRFIDRIQILPRGNGCPRKEIIVWKKNKSIVCVDPQAEWIQRMMEVLRKRSSSTLPVPVFKRKIP

SEQ ID NO: 105 - protein, 114 aa, Homo sapiens
MSLLSSRAARVPGPSSSLCALLVLLLLLTQPGPIASAGPAAAVLRELRCVCLQTTQGVHPKMISNLQVFAIGPQCSKVEVVASLKNGKEICLDPEAPFLKKVIQKILDGGNKEN

SEQ ID NO: 106 - protein, 253 aa, Homo sapiens
MAASGESGTSGGGGSTEEAFMTFYSEVKQIEKRDSVLTSKNQIERLTRPGSSYFNLNPFEVLQIDPEVTDEEIKKRFRQLSILVHPDKNQDDADRAQKAFEAVDKAYKLLLDQEQKKRALDVIQAGKEYVEHTVKERKKQLKKEGKPTIVEEDDPELFKQAVYKQTMKLFAELEIKRKEREAKEMHERKRQREEEIEAQEKAKREREWQKNFEESRDGRVDSWRNFQANTKGKKEKKNRTFLRPPKVKMEQRE

SEQ ID NO: 107 - protein, 185 aa, Homo sapiens
MSGSFELSVQDLNDLLSDGSGCYSLPSQPCNEVTPRIYVGNASVAQDIPKLQKLGITHVLNAAEGRSFMHVNTNANFYKDSGITYLGIKANDTQEFNLSAYFERAADFIDQALAQKNGRVLVHCREGYSRSPTLVIAYLMMRQKMDVKSALSIVRQNREIGPNDGFLAQLCQLNDRLAKEGKLKP

SEQ ID NO: 108 - protein, 858 aa, Homo sapiens
MVNFTVDQIRAIMDKKANIRNMSVIAHVDHGKSTLTDSLVCKAGIIASARAGETRFTDTRKDEQERCITIKSTAISLFYELSENDLNFIKQSKDGAGFLINLIDSPGHVDFSSEVTAALRVTDGALVVVDCVSGVCVQTETVLRQAIAERIKPVLMMNKMDRALLELQLEPEELYQTFQRIVENVNVIISTYGEGESGPMGNIMIDPVLGTVGFGSGLHGWAFTLKQFAEMYVAKFAAKGEGQLGPAERAKKVEDMMKKLWGDRYFDPANGKFSKSATSPEGKKLPRTFCQLILDPIFKVFDAIMNFKKEETAKLIEKLDIKLDSEDKDKEGKPLLKAVMRRWLPAGDALLQMITIHLPSPVTAQKYRCELLYEGPPDDEAAMGIKSCDPKGPLMMYISKMVPTSDKGRFYAFGRVFSGLVSTGLKVRIMGPNYTPGKKEDLYLKPIQRTILMMGRYVEPIEDVPCGNIVGLVGVDQFLVKTGTITTFEHAHNMRVMKFSVSPVVRVAVEAKNPADLPKLVEGLKRLAKSDPMVQCIIEESGEHIIAGAGELHLEICLKDLEEDHACIPIKKSDPVVSYRETVSEESNVLCLSKSPNKHNRLYMKARPFPDGLAEDIDKGEVSARQELKQRARYLAEKYEWDVAEARKIWCFGPDGTGPNILTDITKGVQYLNEIKDSVVAGFQWATKEGALCEENMRGVRFDVHDVTLHADAIHRGGGQIIPTARRCLYASVLTAQPRLMEPIYLVEIQCPEQVVGGIYGVLNRKRGHVFEESQVAGTPMFVVKAYLPVNESFGFTADLRSNTGGQAFPQCVFDHWQILPGDPFDNSSRPSQVVAETRKRKGLKEGIPALDNFLDKL

SEQ ID NO: 109 - protein, 834 aa, Homo sapiens
MAQKMDCGAGLLGFQNPDACRAVCHPLPQPPASTLPLSAFPTLCDPPYSQLRDPPAVLSCYCTPLGASPAPAEASVEDSALLMQTLMEAIQISEAPPTNQATAAASPQSSQPPTANEMADIQVSAAAARPKSAFKVQNATTKGPNGVYDFSQAHNAKDVPNTQPKAAFKSQNATPKGPNAAYDFSQAATTGELAANKSEMAFKAQNATTKVGPNATYNFSQSLNANDLANSRPKTPFKAWNDTTKAPTADTQTQNVNQAKMATSQADIETDPGISEPDGATAQTSADGSQAQNLESRTIIRGKRTRKINNLNVEENSSGDQRRAPLAAGTWRSAPVPVTTQNPPGAPPNVLWQTPLAWQNPSGWQNQTARQTPPARQSPPARQTPPAWQNPVAWQNPVIWPNPVIWQNPVIWPNPIVWPGPVVWPNPLAWQNPPGWQTPPGWQTPPGWQGPPDWQGPPDWPLPPDWPLPPDWPLPTDWPLPPDWIPADWPIPPDWQNLRPSPNLRPSPNSRASQNPGAAQPRDVALLQERANKLVKYLMLKDYTKVPIKRSEMLRDIIREYTDVYPEIIERACFVLEKKFGIQLKEIDKEEHLYILISTPESLAGILGTTKDTPKLGLLLVILGVIFMNGNRASEAVLWEALRKMGLRPGVRHPLLGDLRKLLTYEFVKQKYLDYRRVPNSNPPEYEFLWGLRSYHETSKMKVLRFIAEVQKRDPRDWTAQFMEAADEALDALDAAAAEAEARAEARTRMGIGDEAVSGPWSWDDIEFELLTWDEEGDFGDPWSRIPFTFWARYHQNARSRFPQTFAGPIIGPGGTASANFAANFGAIGFFWVE

SEQ ID NO: 110 - protein, 245 aa, Homo sapiens
MNNKFDALKDDDSGDHDQNEENSTQKDGEKEKTERDKNQSSSKRKAVVPGPAEHPLQYNYTFWYSRRTPGRPTSSQSYEQNIKQIGTFASVEQFWRFYSHMVRPGDLTGHSDFHLFKEGIKPMWEDDANKNGGKWIIRLRKGLASRCWENLILAMLGEQFMVGEEICGAVVSVRFQEDIISIWNKTASDQATTARIRDTLRRVLNLPPNTIMEYKTHTDSIKMPGRLGPQRLLFQNLWKPRLNVP

SEQ ID NO: 111 - protein, 573 aa, Homo sapiens
MLRLPTVFRQMRPVSRVLAPHLTRAYAKDVKFGADARALMLQGVDLLADAVAVTMGPKGRTVIIEQSWGSPKVTKDGVTVAKSIDLKDKYKNIGAKLVQDVANNTNEEAGDGTTTATVLARSIAKEGFEKISKGANPVEIRRGVMLAVDAVIAELKKQSKPVTTPEEIAQVATISANGDKEIGNIISDAMKKVGRKGVITVKDGKTLNDELEIIEGMKFDRGYISPYFINTSKGQKCEFQDAYVLLSEKKISSIQSIVPALEIANAHRKPLVIIAEDVDGEALSTLVLNRLKVGLQVVAVKAPGFGDNRKNQLKDMAIATGGAVFGEEGLTLNLEDVQPHDLGKVGEVIVTKDDAMLLKGKGDKAQIEKRIQEIIEQLDVTTSEYEKEKLNERLAKLSDGVAVLKVGGTSDVEVNEKKDRVTDALNATRAAVEEGIVLGGGCALLRCIPALDSLTPANEDQKIGIEIIKRTLKIPAMTIAKNAGVEGSLIVEKIMQSSSEVGYDAMAGDFVNMVEKGIIDPTKVVRTALLDAAGVASLLTTAEVVVTEIPKEEKDPGMGAMGGMGGGMGGGMF

SEQ ID NO: 112 - protein, 155 aa, Homo sapiens
MTPGKTSLVSLLLLLSLEAIVKAGITIPRNPGCPNSEDKNFPRTVMVNLNIHNRNTNTNPKRSSDYYNRSTSPWNLHRNEDPERYPSVIWEAKCRHLGCINADGNVDYHMNSVPIQQEILVLRREPPHCPNSFRLEKILVSVGCTCVTPIVHHVA

SEQ ID NO: 113 - protein, 758 aa, Homo sapiens
MAEPRQEFEVMEDHAGTYGLGDRKDQGGYTMHQDQEGDTDAGLKESPLQTPTEDGSEEPGSETSDAKSTPTAEDVTAPLVDEGAPGKQAAAQPHTEIPEGTTAEEAGIGDTPSLEDEAAGHVTQEPESGKVVQEGFLREPGPPGLSHQLMSGMPGAPLLPEGPREATRQPSGTGPEDTEGGRHAPELLKHQLLGDLHQEGPPLKGAGGKERPGSKEEVDEDRDVDESSPQDSPPSKASPAQDGRPPQTAAREATSIPGFPAEGAIPLPVDFLSKVSTEIPASEPDGPSVGRAKGQDAPLEFTFHVEITPNVQKEQAHSEEHLGRAAFPGAPGEGPEARGPSLGEDTKEADLPEPSEKQPAAAPRGKPVSRVPQLKARMVSKSKDGTGSDDKKAKTSTRSSAKTLKNRPCLSPKHPTPGSSDPLIQPSSPAVCPEPPSSPKYVSSVTSRTGSSGAKEMKLKGADGKTKIATPRGAAPPGQKGQANATRIPAKTPPAPKTPPSSGEPPKSGDRSGYSSPGSPGTPGSRSRTPSLPTPPTREPKKVAVVRTPPKSPSSAKSRLQTAPVPMPDLKNVKSKIGSTENLKHQPGGGKVQIINKKLDLSNVQSKCGSKDNIKHVPGGGSVQIVYKPVDLSKVTSKCGSLGNIHHKPGGGQVEVKSEKLDFKDRVQSKIGSLDNITHVPGGGNKKIETHKLTFRENAKAKTDHGAEIVYKSPVVSGDTSPRHLSNVSSTGSIDMVDSPQLATLADEVSASLAKQGL

SEQ ID NO: 114 - protein, 1133 aa, Homo sapiens
MDVLAEEFGNLTPEQLAAPIPTVEEKWRLLPAFLKVKGLVKQHIDSFNYFINVEIKKIMKANEKVTSDADPMWYLKYLNIYVGLPDVEESFNVTRPVSPHECRLRDMTYSAPITVDIEYTRGSQRIIRNALPIGRMPIMLRSSNCVLTGKTPAEFAKLNECPLDPGGYFIVKGVEKVILIQEQLSKNRIIVEADRKGAVGASVTSSTHEKKSRTNMAVKQGRFYLRHNTLSEDIPIVIIFKAMGVESDQEIVQMIGTEEHVMAAFGPSLEECQKAQIFTQMQALKYIGNKVRRQRMWGGGPKKTKIEEARELLASTILTHVPVKEFNFRAKCIYTAVMVRRVILAQGDNKVDDRDYYGNKRLELAGQLLSLLFEDLFKKFNSEMKKIADQVIPKQRAAQFDVVKHMRQDQITNGMVNAISTGNWSLKRFKMDRQGVTQVLSRLSYISALGMMTRISSQFEKTRKVSGPRSLQPSQWGMLCPSDTPEGEACGLVKNLALMTHITTDMEDGPIVKLASNLGVEDVNLLCGEELSYPNVFLVFLNGNILGVIRDHKKLVNTFRLMRRAGYINEFVSISTNLTDRCVYISSDGGRLCRPYIIVKKQKPAVTNKHMEELAQGYRNFEDFLHESLVEYLDVNEENDCNIALYEHTINKDTTHLEIEPFTLLGVCAGLIPYPHHNQSPRNTYQCAMGKQAMGTIGYNQRNRIDTLMYLLAYPQKPMVKTKTIELIEFEKLPAGQNATVAVMSYSGYDIEDALVLNKASLDRGFGRCLVYKNAKCTLKRYTNQTFDKVMGPMLDAATRKPIWRHEILDADGICSPGEKVENKQVLVNKSMPTVTQIPLEGSNVPQQPQYKDVPITYKGATDSYIEKVMISSNAEDAFLIKMLLRQTRRPEIGDKFSSRHGQKGVCGLIVPQEDMPFCDSGICPDIIMNPHGFPSRMTVGKLIELLAGKAGVLDGRFHYGTAFGGSKVKDVCEDLVRHGYNYLGKDYVTSGITGEPLEAYIYFGPVYYQKLKHMVLDKMHARARGPRAVLTRQPTEGRSRDGGLRLGEMERDCLIGYGASMLLLERLMISSDAFEVDVCGQCGLLGYSGWCHYCKSSCHVSSLRIPYACKLLFQELQSMNIIPRLKLSKYNE

SEQ ID NO: 115 - protein, 1804 aa, Homo sapiens
MTSLKRSQTERPLATDRASVVGTDGTPKVHTDDFYMRRFRSQNGSLGSSVMAPVGPPRSEGSHHITSTPGVPKMGVRARIADWPPRKENIKESSRSSQEIETSSCLDSLSSKSSPVSQGSSVSLNSNDSAMLKSIQNTLKNKTRPSENMDSRFLMPEAYPSSPRKALRRIRQRSNSDITISELDVDSFDECISPTYKTGPSLHREYGSTSSIDKQGTSGESFFDLLKGYKDDKSDRGPTPTKLSDFLITGGGKGSGFSLDVIDGPISQRENLRLFKEREKPLKRRSKSETGDSSIFRKLRNAKGEELGKSSDLEDNRSEDSVRPWTCPKCFAHYDVQSILFDLNEAIMNRHNVIKRRNTTTGASAAAVASLVSGPLSHSASFSSPMGSTEDLNSKGSLSMDQGDDKSNELVMSCPYFRNEIGGEGERKISLSKSNSGSFSGCESASFESTLSSHCTNAGVAVLEVPKENLVLHLDRVKRYIVEHVDLGAYYYRKFFYQKEHWNYFGADENLGPVAVSIRREKPDEMKENGSPYNYRIIFRTSELMTLRGSVLEDAIPSTAKHSTARGLPLKEVLEHVVPELNVQCLRLAFNTPKVTEQLMKLDEQGLNYQQKVGIMYCKAGQSTEEEMYNNESAGPAFEEFLQLLGERVRLKGFEKYRAQLDTKTDSTGTHSLYTTYKDYEIMFHVSTMLPYTPNNKQQLLRKRHIGNDIVTIVFQEPGAQPFSPKNIRSHFQHVFVIVRVHNPCSDSVCYSVAVTRSRDVPSFGPPIPKGVTFPKSNVFRDFLLAKVINAENAAHKSEKFRAMATRTRQEYLKDLAEKNVTNTPIDPSGKFPFISLASKKKEKSKPYPGAELSSMGAIVWAVRAEDYNKAMELDCLLGISNEFIVLIEQETKSVVFNCSCRDVIGWTSTDTSLKIFYERGECVSVGSFINIEEIKEIVKRLQFVSKGCESVEMTLRRNGLGQLGFHVNYEGIVADVEPYGYAWQAGLRQGSRLVEICKVAVATLSHEQMIDLLRTSVTVKVVIIPPHDDCTPRRSCSETYRMPVMEYKMNEGVSYEFKFPFRNNNKWQRNASKGPHSPQVPSQVQSPMTSRLNAGKGDGKMPPPERAANIPRSISSDGRPLERRLSPGSDIYVTVSSMALARSQCRNSPSNLSSSSDTGSVGGTYRQKSMPEGFGVSRRSPASIDRQNTQSDIGGSGKSTPSWQRSEDSIADQMAYSYRGPQDFNSFVLEQHEYTEPTCHLPAVSKVLPAFRESPSGRLMRQDPVVHLSPNKQGHSDSHYSSHSSSNTLSSNASSAHSDEKWYDGDRTESELNSYNYLQGTSADSGIDTTSYGPSHGSTASLGAATSSPRSGPGKEKVAPLWHSSSEVISMADRTLETESHGLDRKTESSLSLDIHSKSQAGSTPLTRENSTFSINDAASHTSTMSSRHSASPVVFTSARSSPKEELHPAAPSQLAPSFSSSSSSSSGPRSFYPRQGATSKYLIGWKKPEGTINSVGFMDTRKRHQSDGNEIAHTRLRASTRDLRASPKPTSKSTIEEDLKKLIDLESPTPESQKSFKFHALSSPQSPFPSTPTSRRALHRTLSDESIYNSQREHFFTSRASLLDQALPNDVLFSSTYPSLPKSLPLRRPSYTLGMKSLHGEFSASDSSLTDIQETRRQPMPDPGLMPLPDTAADLDWSNLVDAAKAYEVQRASFFAASDENHRPLSAASNSDQLEDQALAQMKPYSSSKDSSPTLASKVDQLEGMLKMLREDLKKEKEDKAHLQAEVQHLREDNLRLQEESQNASDKLKKFTEWVFNTIDMS

SEQ ID NO: 116 - protein, 95 aa, Homo sapiens
MADEKPKEGVKTENNDHINLKVAGQDGSVVQFKIKRHTPLSKLMKAYCERQGLSMRQIRFRFDGQPINETDTPAQLEMEDEDTIDVFQQQTGGVY

SEQ ID NO: 117 - protein, 581 aa, Homo sapiens
MAVAGAVSGEPLVHWCTQQLRKTFGLDVSEEIIQYVLSIESAEEIREYVTDLLQGNEGKKGQFIEELITKWQKNDQELISDPLQQCFKKDEILDGQKSGDHLKRGRKKGRNRQEVPAFTEPDTTAEVKTPFDLAKAQENSNSVKKKTKFVNLYTREGQDRLAVLLPGRHPCDCLGQKHKLINNCLICGRIVCEQEGSGPCLFCGTLVCTHEEQDILQRDSNKSQKLLKKLMSGVENSGKVDISTKDLLPHQELRIKSGLEKAIKHKDKLLEFDRTSIRRTQVIDDESDYFASDSNQWLSKLERETLQKREEELRELRHASRLSKKVTIDFAGRKILEEENSLAEYHSRLDETIQAIANGTLNQPLTKLDRSSEEPLGVLVNPNMYQSPPQWVDHTGAASQKKAFRSSGFGLEFNSFQHQLRIQDQEFQEGFDGGWCLSVHQPWASLLVRGIKRVEGRSWYTPHRGRLWIAATAKKPSPQEVSELQATYRLLRGKDVEFPNDYPSGCLLGCVDLIDCLSQKQFKEQFPDISQESDSPFVFICKNPQEMVVKFPIKGNPKIWKLDSKIHQGAKKGLMKQNKAV

SEQ ID NO: 118 - protein, 502 aa, Homo sapiens
MASKKLGADFHGTFSYLDDVPFKTGDKFKTPAKVGLPIGFSLPDCLQVVREVQYDFSLEKKTIEWAEEIKKIEEAEREAECKIAEAEAKVNSKSGPEGDSKMSFSKTHSTATMPPPINPILASLQHNSILTPTRVSSSATKQKVLSPPHIKADFNLADFECEEDPFDNLELKTIDEKEELRNILVGTTGPIMAQLLDNNLPRGGSGSVLQDEEVLASLERATLDFKPLHKPNGFITLPQLGNCEKMSLSSKVSLPPIPAVSNIKSLSFPKLDSDDSNQKTAKLASTFHSTSCLRNGTFQNSLKPSTQSSASELNGHHTLGLSALNLDSGTEMPALTSSQMPSLSVLSVCTEESSPPNTGPTVTPPNFSVSQVPNMPSCPQAYSELQMLSPSERQCVETVVNMGYSYECVLRAMKKKGENIEQILDYLFAHGQLCEKGFDPLLVEEALEMHQCSEEKMMEFLQLMSKFKEMGFELKDIKEVLLLHNNDQDNALEDLMARAGAS

SEQ ID NO: 119 - protein, 605 aa, Homo sapiens
MDPAEAVLQEKALKFMCSMPRSLWLGCSSLADSMPSLRCLYNPGTGALTAFQNSSEREDCNNGEPPRKIIPEKNSLRQTYNSCARLCLNQETVCLASTAMKTENCVAKTKLANGTSSMIVPKQRKLSASYEKEKELCVKYFEQWSESDQVEFVEHLISQMCHYQHGHINSYLKPMLQRDFITALPARGLDHIAENILSYLDAKSLCAAELVCKEWYRVTSDGMLWKKLIERMVRTDSLWRGLAERRGWGQYLFKNKPPDGNAPPNSFYRALYPKIIQDIETIESNWRCGRHSLQRIHCRSETSKGVYCLQYDDQKIVSGLRDNTIKIWDKNTLECKRILTGHTGSVLCLQYDERVIITGSSDSTVRVWDVNTGEMLNTLIHHCEAVLHLRFNNGMMVTCSKDRSIAVWDMASPTDITLRRVLVGHRAAVNVVDFDDKYIVSASGDRTIKVWNTSTCEFVRTLNGHKRGIACLQYRDRLVVSGSSDNTIRLWDIECGACLRVLEGHEELVRCIRFDNKRIVSGAYDGKIKVWDLVAALDPRAPAGTLCLRTLVEHSGRVFRLQFDEFQIVSSSHDDTILIWDFLNDPAAQAEPPRSPSRTYTYISR

SEQ ID NO: 120 - protein, 1210 aa, Homo sapiens [sequence omitted]

SEQ ID NO: 121 - protein, 2477 aa, Homo sapiens
MLRGPGPGLLLLAVQCLGTAVPSTGASKSKRQAQQMVQPQSPVAVSQSKPGCYDNGKHYQINQQWERTYLGNALVCTCYGGSRGFNCESKPEAEETCFDKYTGNTYRVGDTYERPKDSMIWDCTCIGAGRGRISCTIANRCHEGGQSYKIGDTWRRPHETGGYMLECVCLGNGKGEWTCKPIAEKCFDHAAGTSYVVGETWEKPYQGWMMVDCTCLGEGSGRITCTSRNRCNDQDTRTSYRIGDTWSKKDNRGNLLQCICTGNGRGEWKCERHTSVQTTSSGSGPFTDVRAAVYQPQPHPQPPPYGHCVTDSGVVYSVGMQWLKTQGNKQMLCTCLGNGVSCQETAVTQTYGGNSNGEPCVLPFTYNGRTFYSCTTEGRQDGHLWCSTTSNYEQDQKYSFCTDHTVLVQTRGGNSNGALCHFPFLYNNHNYTDCTSEGRRDNMKWCGTTQNYDADQKFGFCPMAAHEEICTTNEGVMYRIGDQWDKQHDMGHMMRCTCVGNGRGEWTCIAYSQLRDQCIVDDITYNVNDTFHKRHEEGHMLNCTCFGQGRGRWKCDPVDQCQDSETGTFYQIGDSWEKYVHGVRYQCYCYGRGIGEWHCQPLQTYPSSSGPVEVFITETPSQPNSHPIQWNAPQPSHISKYILRWRPKNSVGRWKEATIPGHLNSYTIKGLKPGVVYEGQLISIQQYGHQEVTRFDFTTTSTSTPVTSNTVTGETTPFSPLVATSESVTEITASSFVVSWVSASDTVSGFRVEYELSEEGDEPQYLDLPSTATSVNIPDLLPGRKYIVNVYQISEDGEQSLILSTSQTTAPDAPPDPTVDQVDDTSIVVRWSRPQAPITGYRIVYSPSVEGSSTELNLPETANSVTLSDLQPGVQYNITIYAVEENQESTPVVIQQETTGTPRSDTVPSPRDLQFVEVTDVKVTIMWTPPESAVTGYRVDVIPVNLPGEHGQRLPISRNTFAEVTGLSPGVTYYFKVFAVSHGRESKPLTAQQTTKLDAPTNLQFVNETDSTVLVRWTPPRAQITGYRLTVGLTRRGQPRQYNVGPSVSKYPLRNLQPASEYTVSLVAIKGNQESPKATGVFTTLQPGSSIPPYNTEVTETTIVITWTPAPRIGFKLGVRPSQGGEAPREVTSDSGSIVVSGLTPGVEYVYTIQVLRDGQERDAPIVNKVVTPLSPPTNLHLEANPDTGVLTVSWERSTTPDITGYRITTTPTNGQQGNSLEEVVHADQSSCTFDNLSPGLEYNVSVYTVKDDKESVPISDTIIPEVPQLTDLSFVDITDSSIGLRWTPLNSSTIIGYRITVVAAGEGIPIFEDFVDSSVGYYTVTGLEPGIDYDISVITLINGGESAPTTLTQQTAVPPPTDLRFTNIGPDTMRVTWAPPPSIDLTNFLVRYSPVKNEEDVAELSISPSDNAVVLTNLLPGTEYVVSVSSVYEQHESTPLRGRQKTGLDSPTGIDFSDITANSFTVHWIAPRATITGYRIRHHPEHFSGRPREDRVPHSRNSITLTNLTPGTEYVVSIVALNGREESPLLIGQQSTVSDVPRDLEVVAATPTSLLISWDAPAVTVRYYRITYGETGGNSPVQEFTVPGSKSTATISGLKPGVDYTITVYAVTGRGDSPASSKPISINYRTEIDKPSQMQVTDVQDNSISVKWLPSSSPVTGYRVTTTPKNGPGPTKTKTAGPDQTEMTIEGLQPTVEYVVSVYAQNPSGESQPLVQTAVTNIDRPKGLAFTDVDVDSIKIAWESPQGQVSRYRVTYSSPEDGIHELFPAPDGEEDTAELQGLRPGSEYTVSVVALHDDMESQPLIGTQSTAIPAPTDLKFTQVTPTSLSAQWTPPNVQLTGYRVRVTPKEKTGPMKEINLAPDSSSVVVSGLMVATKYEVSVYALKDTLTSRPAQGVVTTLENVSPPRRARVTDATETTITISWRTKTETITGFQVDAVPANGQTPIQRTIKPDVRSYTITGLQPGTDYKIYLYTLNDNARSSPVVIDASTAIDAPSNLRFLATTPNSLLVSWQPPRARITGYIIKYEKPGSPPREVVPRPRPGVTEATITGLEPGTEYTIYVIALKNNQKSEPLIGRKKTDELPQLVTLPHPNLHGPEILDVPSTVQKTPFVTHPGYDTGNGIQLPGTSGQQPSVGQQMIFEEHGFRRTTPPTTATPIRHRPRPYPPNVGEEIQIGHIPREDVDYHLYPHGPGLNPNASTGQEALSQTTISWAPFQDTSEYIISCHPVGTDEEPLQFRVPGTSTSATLTGLTRGATYNIIVEALKDQQRHKVREEVVTVGNSVNEGLNQPTDDSCFDPYTVSHYAVGDEWERMSESGFKLLCQCLGFGSGHFRCDSSRWCHDNGVNYKIGEKWDRQGENGQMMSCTCLGNGKGEFKCDPHEATCYDDGKTYHVGEQWQKEYLGAICSCTCFGGQRGWRCDNCRRPGGEPSPEGTTGQSYNQYSQRYHQRTNTNVNCPIECFMPLDVQADREDSRE

SEQ ID NO: 122 - protein, 469 aa, Homo sapiens
MSIHFSSPVFTSRSAAFSGRGAQVRLSSARPGGLGSSSLYGLGASRPRVAVRSAYGGPVGAGIREVTINQSLLAPLRLDADPSLQRVRQEESEQIKTLNNKFASFIDKVRFLEQQNKLLETKWTLLQEQKSAKSSRLPDIFEAQIAGLRGQLEALQVDGGRLEAELRSMQDVVEDFKNKYEDEINHRTAAENEFVVLKKDVDAAYMSKVELEAKVDALNDEINFLRTLNETELTELQSQISDTSVVLSMDNSRSLDLDGIIAEVKAQYEEMAKCSRAEAEAWYQTKFETLQAQAGKHGDDLRNTRNEISEMNRAIQRLQAEIDNIKNQRAKLEAAIAEAEERGELALKDARAKQEELEAALQRGKQDMARQLREYQELMSVKLALDIEIATYRKLLEGEESRLAGDGVGAVNISVMNSTGGSSSGGGIGLTLGGTMGSNALSFSSSAGPGLLKAYSIRTASASRRSARD

SEQ ID NO: 123 - protein, 1798 aa, Homo sapiens
MELTSRERGRGQPLPWELRLGLLLSVLAATLAQAPAPDVPGCSRGSCYPATGDLLVGRADRLTASSTCGLNGPQPYCIVSHLQDEKKCFLCDSRRPFSARDNPHSHRIQNVVTSFAPQRRAAWWQSENGIPAVTIQLDLEAEFHFTHLIMTFKTFRPAAMLVERSADFGRTWHVYRYFSYDCGADFPGVPLAPPRHWDDVVCESRYSEIEPSTEGEVIYRVLDPAIPIPDPYSSRIQNLLKITNLRVNLTRLHTLGDNLLDPRREIREKYYYALYELVVRGNCFCYGHASECAPAPGAPAHAEGMVHGACICKHNTRGLNCEQCQDFYRDLPWRPAEDGHSHACRKCECHGHTHSCHFDMAVYLASGNVSGGVCDGCQHNTAGRHCELCRPFFYRDPTKDLRDPAVCRSCDCDPMGSQDGGRCDSHDDPALGLVSGQCRCKEHVVGTRCQQCRDGFFGLSISDRLGCRRCQCNARGTVPGSTPCDPNSGSCYCKRLVTGRGCDRCLPGHWGLSHDLLGCRPCDCDVGGALDPQCDEGTGQCHCRQHMVGRRCEQVQPGYFRPFLDHLIWEAEDTRGQVLDVVERLVTPGETPSWTGSGFVRLQEGQTLEFLVASVPKAMDYDLLLRLEPQVPEQWAELELIVQRPGPVPAHSLCGHLVPKDDRIQGTLQPHARYLIFPNPVCLEPGISYKLHLKLVRTGGSAQPETPYSGPGLLIDSLVLLPRVLVLEMFSGGDAAALERQATFERYQCHEEGLVPSKTSPSEACAPLLISLSTLIYNGALPCQCNPQGSLSSECNPHGGQCLCKPGVVGRRCDLCAPGYYGFGPTGCQACQCSHEGALSSLCEKTSGQCLCRTGAFGLRCDRCQRGQWGFPSCRPCVCNGHADECNTHTGACLGCRDHTGGEHCERCIAGFHGDPRLPYGGQCRPCPCPEGPGSQRHFATSCHQDEYSQQIVCHCRAGYTGLRCEACAPGHFGDPSRPGGRCQLCECSGNIDPMDPDACDPHTGQCLRCLHHTEGPHCAHCKPGFHGQAARQSCHRCTCNLLGTNPQQCPSPDQCHCDPSSGQCPCLPNVQGPSCDRCAPNFWNLTSGHGCQPCACHPSRARGPTCNEFTGQCHCRAGFGGRTCSECQELHWGDPGLQCHACDCDSRGIDTPQCHRFTGHCSCRPGVSGVRCDQCARGFSGIFPACHPCHACFGDWDRVVQDLAARTQRLEQRAQELQQTGVLGAFESSFWHMQEKLGIVQGIVGARNTSAASTAQLVEATEELRREIGEATEHLTQLEADLTDVQDENFNANHALSGLERDRLALNLTLRQLDQHLDLLKHSNFLGAYDSIRHAHSQSAEAERRANTSALAVPSPVSNSASARHRTEALMDAQKEDFNSKHMANQRALGKLSAHTHTLSLTDINELVCGAPGDAPCATSPCGGAGCRDEDGQPRCGGLSCNGAAATADLALGRARHTQAELQRALAEGGSILSRVAETRRQASEAQQRAQAALDKANASRGQVEQANQELQELIQSVKDFLNQEGADPDSIEMVATRVLELSIPASAEQIQHLAGAIAERVRSLADVDAILARTVGDVRRAEQLLQDARRARSWAEDEKQKAETVQAALEEAQRAQGIAQGAIRGAVADTRDTEQTLYQVQERMAGAERALSSAGERARQLDALLEALKLKRAGNSLAASTAEETAGSAQGRAQEAEQLLRGPLGDQYQTVKALAERKAQGVLAAQARAEQLRDEARDLLQAAQDKLQRLQELEGTYEENERALESKAAQLDGLEARMRSVLQAINLQVQIYNTCQ

SEQ ID NO: 124 - protein, 520 aa, Homo sapiens
MQSESGIVPDFEVGEEFHEEPKTYYELKSQPLKSSSSAEHPGASKPPISSSSMTSRILLRQQLMREQMQEQERREQQQKLQAAQFMQQRVPVSQTPAINVSVPTTLPSATQVPMEVLKVQTHLENPTKYHIQQAQRQQVKQYLSTTLANKHANQVLSLPCPNQPGDHVMPPVPGSSAPNSPMAMLTLNSNCEKEGFYKFEEQNRAESECPGMNTHSRASCMQMDDVIDDIISLESSYNEEILGLMDPALQMANTLPVSGNLIDLYGNQGLPPPGLTISNSCPANLPNIKRELTESEARALAKERQKKDNHNLIERRRRFNINDRIKELGTLIPKSNDPDMRWNKGTILKASVDYIRKLQREQQRAKELENRQKKLEHANRHLLLRIQELEMQARAHGLSLIPSTGLCSPDLVNRIIKQEPVLENCSQDLLQHHADLTCTTTLDLTDGTITFNNNLGTGTEANQAYSVPTKMGSKLEDILMDDTLSPVGVTDPLLSSVSPGASKTSSRRSSMSMEETEHTC

SEQ ID NO: 125 - protein, 1756 aa, Homo sapiens
MNSLFRKRNKGKYSPTVQTRSISNKELSELIEQLQKNADQVEKNIVDTEAKMQSDLARLQEGRQPEHRDVTLQKVLDSEKLLYVLEADAAIAKHMKHPQGDMIAEDIRQLKERVTNLRGKHKQIYRLAVKEVDPQVNWAALVEEKLDKLNNQSFGTDLPLVDHQVEEHNIFHNEVKAIGPHLAKDGDKEQNSELRAKYQKLLAASQARQQHLSSLQDYMQRCTNELYWLDQQAKGRMQYDWSDRNLDYPSRRRQYENFINRNLEAKEERINKLHSEGDQLLAAEHPGRNSIEAHMEAVHADWKEYLNLLICEESHLKYMEDYHQFHEDVKDAQELLRKVDSDLNQKYGPDFKDRYQIELLLRELDDQEKVLDKYEDVVQGLQKRGQQVVPLKYRRETPLKPIPVEALCDFEGEQGLISRGYSYTLQKNNGESWELMDSAGNKLIAPAVCFVIPPTDPEALALADSLGSQYRSVRQKAAGSKRTLQQRYEVLKTENPGDASDLQGRQLLAGLDKVASDLDRQEKAITGILRPPLEQGRAVQDSAERAKDLKNITNELLRIEPEKTRSTAEGEAFIQALPGSGTTPLLRTRVEDTNRKYEHLLQLLDLAQEKVDVANRLEKSLQQSWELLATHENHLNQDDTVPESSRVLDSKGQELAAMACELQAQKSLLGEVEQNLQAAKQCSSTLASRFQEHCPDLERQEAEVHKLGQRFNNLRQQVERRAQSLQSAKAAYEHFHRGHDHVLQFLVSIPSYEPQETDSLSQMETKLKNQKNLLDEIASREQEVQKICANSQQYQQAVKDYELEAEKLRSLLDLENGRSSHVSKRARLQSPATKVKEEEAALAAKFTEVYAINRQRLQNLEFALNLLRQQPEVEVTHETLQRNRPDSGVEEAWKIRKELDEETERRRQLENEVKSTQEEIWTLRNQGPQESVVRKEVLKKVPDPVLEESFQQLQRTLAEEQHKNQLLQEELEALQLQLRALEQETRDGGQEYVVKEVLRIEPDRAQADEVLQLREELEALRRQKGAREAEVLLLQQRVAALAEEKSRAQEKVTEKEVVKLQNDPQLEAEYQQLQEDHQRQDQLREKQEEELSFLQDKLKRLEKERAMAEGKITVKEVLKVEKDAATEREVSDLTRQYEDEAAKARASQREKTELLRKIWALEEENAKVVVQEKVREIVRPDPKAESEVANLRLELVEQERKYRGAEEQLRSYQSELEALRRRGPQVEVKEVTKEVIKYKTDPEMEKELQRLREEIVDKTRLIERCDLEIYQLKKEIQALKDTKPQVQTKEVVQEILQFQEDPQTKEEVASLRAKLSEEQKKQVDLERERASQEEQIARKEEELSRVKERVVQQEVVRYEEEPGLRAEASAFAESIDVELRQIDKLRAELRRLQRRRTELERQLEELERERQARREAEREVQRLQQRLAALEQEEAEAREKVTHTQKVVLQQDPQQAREHALLRLQLEEEQHRRQLLEGELETLRRKLAALEKAEVKEKVVLSESVQVEKGDTEQEIQRLKSSLEEESRSKRELDVEVSRLEARLSELEFHNSKSSKELDFLREENHKLQLERQNLQLETRRLQSEINMAATETRDLRNMTVADSGTNHDSRLWSLERELDDLKRLSKDKDLEIDELQKRLGSVAVKREQRENHLRRSIVVIHPDTGRELSPEEAHRAGLIDWNMFVKLRSQECDWEEISVKGPNGESSVIHDRKSGKKFSIEEALQSGRLTPAQYDRYVNKDMSIQELAVLVSGQK

SEQ ID NO: 126 - protein, 410 aa, Homo sapiens
MPGVCDRAPDFLSPSEDQVLRPALGSSVALNCTAWVVSGPHCSLPSVQWLKDGLPLGIGGHYSLHEYSWVKANLSEVLVSSVLGVNVTSTEVYGAFTCSIQNISFSSFTLQRAGPTSHVAAVLASLLVLLALLLAALLYVKCRLNVLLWYQDAYGEVEINDGKLYDAYVSYSDCPEDRKFVNFILKPQLERRRGYKLFLDDRDLLPRAEPSADLLVNLSRCRRLIVVLSDAFLSRAWCSHSFREGLCRLLELTRRPIFITFEGQRRDPAHPALRLLRQHRHLVTLLLWRPGSVTPSSDFWKEVQLALPRKVQYRPVEGDPQTQLQDDKDPMLILRGRVPEGRALDSEVDPDPEGDLGVRGPVFGEPSAPPHTSGVSLGESRSSEVDVSDLGSRNYSARTDFYCLVSKDDM

SEQ ID NO: 127 - protein, 151 aa, Homo sapiens
MSIPFSNTHYRIPQGFGNLLEGLTREILREQPDNIPAFAAAYFESLLEKREKTNFDPAEWGSKVEDRFYNNHAFEEQEPPEKSDPKQEESQISGKEEETSVTILDSSEEDKEKEEVAAVKIQAAFRGHIAREEAKKMKTNSLQNEEKEENK

SEQ ID NO: 128 - protein, 484 aa, Homo sapiens
MAELRPSGAPGPTAPPAPGPTAPPAFASLFPPGLHAIYGECRRLYPDQPNPLQVTAIVKYWLGGPDPLDYVSMYRNVGSPSANIPEHWHYISFGLSDLYGDNRVHEFTGTDGPSGFGFELTFRLKRETGESAPPTWPAELMQGLARYVFQSENTFCSGDHVSWHSPLDNSESRIQHMLLTEDPQMQPVQTPFGVVTFLQIVGVCTEELHSAQQWNGQGILELLRTVPIAGGPWLITDMRRGETIFEIDPHLQERVDKGIETDGSNLSGVSAKCAWDDLSRPPEDDEDSRSICIGTQPRRLSGKDTEQIRETLRRGLEINSKPVLPPINPQRQNGLAHDRAPSRKDSLESDSSTAIIPHELIRTRQLESVHLKFNQESGALIPLCLRGRLLHGRHFTYKSITGDMAITFVSTGVEGAFATEEHPYAAHGPWLQILLTEEFVEKMLEDLEDLTSPEEFKLPKEYSWPEKKLKVSILPDVVFDSPLH

SEQ ID NO: 129 - protein, 274 aa, Homo sapiens
MATTVSTQRGPVYIGELPQDFLRITPTQQQRQVQLDAQAAQQLQYGGAVGTVGRLNITVVQAKLAKNYGMTRMDPYCRLRLGYAVYETPTAHNGAKNPRWNKVIHCTVPPGVDSFYLEIFDERAFSMDDRIAWTHITIPESLRQGKVEDKWYSLSGRQGDDKEGMINLVMSYALLPAAMVMPPQPVVLMPTVYQQGVGYVPITGMPAVCSPGMVPVALPPAAVNAQPRCSEEDLKAIQDMFPNMDQEVIRSVLEAQRGNKDAAINSLLQMGEEP

SEQ ID NO: 130 - protein, 1378 aa, Homo sapiens
MSLERELRQLSKAKAKAQRAGQRREEAALCHQLGELLAGHGRYAEALEQHWQELQLRERADDPLGCAVAHRKIGERLAEMEDYPAALQHQHQYLELAHSLRNHTELQRAWATIGRTHLDIYDHCQSRDALLQAQAAFEKSLAIVDEELEGTLAQGELNEMRTRLYLNLGLTFESLQQTALCNDYFRKSIFLAEQNHLYEDLFRARYNLGTIHWRAGQHSQAMRCLEGARECAHTMRKRFMESECCVVIAQVLQDLGDFLAAKRALKKAYRLGSQKPVQRAAICQNLQHVLAVVRLQQQLEEAEGRDPQGAMVICEQLGDLFSKAGDFPRAAEAYQKQLRFAELLDRPGAERAIIHVSLATTLGDMKDHHGAVRHYEEELRLRSGNVLEEAKTWLNIALSREEAGDAYELLAPCFQKALSCAQQAQRPQLQRQVLQHLHTVQLRLQPQEAPETETRLRELSVAEDEDEEEEAEEAAATAESEALEAGEVELSEGEDDTDGLTPQLEEDEELQGHLGRRKGSKWNRRNDMGETLLHRACIEGQLRRVQDLVRQGHPLNPRDYCGWTPLHEACNYGHLEIVRFLLDHGAAVDDPGGQGCEGITPLHDALNCGHFEVAELLLERGASVTLRTRKGLSPLETLQQWVKLYRRDLDLETRQKARAMEMLLQAAASGQDPHSSQAFHTPSSLLFDPETSPPLSPCPEPPSNSTRLPEASQAHVRVSPGQAAPAMARPRRSRHGPASSSSSSEGEDSAGPARPSQKRPRCSATAQRVAAWTPGPASNREAATASTSRAAYQAAIRGVGSAQSRLGPGPPRGHSKALAPQAALIPEEECLAGDWLELDMPLTRSRRPRPRGTGDNRRPSSTSGSDSEESRPRARAKQVRLTCMQSCSAPVNAGPSSLASEPPGSPSTPRVSEPSGDSSAAGQPLGPAPPPPIRVRVQVQDHLFLIPVPHSSDTHSVAWLAEQAAQRYYQTCGLLPRLTLRKEGALLAPQDLIPDVLQSNDEVLAEVTSWDLPPLTDRYRRACQSLGQGEHQQVLQAVELQGLGLSFSACSLALDQAQLTPLLRALKLHTALRELRLAGNRLGDKCVAELVAALGTMPSLALLDLSSNHLGPEGLRQLAMGLPGQATLQSLEELDLSMNPLGDGCGQSLASLLHACPLLSTLRLQACGFGPSFFLSHQTALGSAFQDAEHLKTLSLSYNALGAPALARTLQSLPAGTLLHLELSSVAAGKGDSDLMEPVFRYLAKEGCALAHLTLSANHLGDKAVRDLCRCLSLCPSLISLDLSANPEISCASLEELLSTLQKRPQGLSFLGLSGCAVQGPLGLGLWDKIAAQLRELQLCSRRLCAEDRDALRQLQPSRPGPGECTLDHGSKLFFRRL

SEQ ID NO: 131 - protein, 437 aa, Homo sapiens
MASVAVDPQPSVVTRVVNLPLVSSTYDLMSSAYLSTKDQYPYLKSVCEMAENGVKTITSVAMTSALPIIQKLEPQIAVANTYACKGLDRIEERLPILNQPSTQIVANAKGAVTGAKDAVTTTVTGAKDSVASTITGVMDKTKGAVTGSVEKTKSVVSGSINTVLGSRMMQLVSSGVENALTKSELLVEQYLPLTEEELEKEAKKVEGFDLVQKPSYYVRLGSLSTKLHSRAYQQALSRVKEAKQKSQQTISQLHSTVHLIEFARKNVYSANQKIQDAQDKLYLSWVEWKRSIGYDDTDESHCAEHIESRTLAIARNLTQQLQTTCHTLLSNIQGVPQNIQDQAKHMGVMAGDIYSVFRNAASFKEVSDSLLTSSKGQLQKMKESLDDVMDYLVNNTPLNWLVGPFYPQLTESQNAQDQGAEMDKSSQETQRSEHKTH

SEQ ID NO: 132 - protein, 731 aa, Homo sapiens
MSGSRQAGSGSAGTSPGSSAASSVTSASSSLSSSPSPPSVAVSAAALVSGGVAQAAGSGGLGGPVRPVLVAPAVSGSGGGAVSTGLSRHSCAARPSAGVGGSSSSLGSGSRKRPLLAPLCNGLINSYEDKSNDFVCPICFDMIEEAYMTKCGHSFCYKCIHQSLEDNNRCPKCNYVVDNIDHLYPNFLVNELILKQKQRFEEKRFKLDHSVSSTNGHRWQIFQDWLGTDQDNLDLANVNLMLELLVQKKKQLEAESHAAQLQILMEFLKVARRNKREQLEQIQKELSVLEEDIKRVEEMSGLYSPVSEDSTVPQFEAPSPSHSSIIDSTEYSQPPGFSGSSQTKKQPWYNSTLASRRKRLTAHFEDLEQCYFSTRMSRISDDSRTASQLDEFQECLSKFTRYNSVRPLATLSYASDLYNGSSIVSSIEFDRDCDYFAIAGVTKKIKVYEYDTVIQDAVDIHYPENEMTCNSKISCISWSSYHKNLLASSDYEGTVILWDGFTGQRSKVYQEHEKRCWSVDFNLMDPKLLASGSDDAKVKLWSTNLDNSVASIEAKANVCCVKFSPSSRYHLAFGCADHCVHYYDLRNTKQPIMVFKGHRKAVSYAKFVSGEEIVSASTDSQLKLWNVGKPYCLRSFKGHINEKNFVGLASNGDYIACGSENNSLYLYYKGLSKTLLTFKFDTVKSVLDKDRKEDDTNEFVSAVCWRALPDGESNVLIAANSQGTIKVLELV

SEQ ID NO: 133 - protein, 735 aa, Homo sapiens
MLVHLFRVGIRGGPFPGRLLPPLRFQTFSAVRNTWRNGKTGQLHKAEGEYSDGYRSSSLLRAVAHLRSQLWAHLPRAPLAPRWSPSAWCWVGGALLGPMVLSKHPHLCLVALCEAEEAPPASSTPHVVGSRFNWKLFWQFLHPHLLVLGVAVVLALGAALVNVQIPLLLGQLVEVVAKYTRDHVGSFMTESQNLSTHLLILYGVQGLLTFGYLVLLSHVGERMAVDMRRALFSSLLRQDITFFDANKTGQLVSRLTTDVQEFKSSFKLVISQGLRSCTQVAGCLVSLSMLSTRLTLLLMVATPALMGVGTLMGSGLRKLSRQCQEQIARAMGVADEALGNVRTVRAFAMEQREEERYGAELEACRCRAEELGRGIALFQGLSNIAFNCMVLGTLFIGGSLVAGQQLTGGDLMSFLVASQTVQRSMANLSVLFGQVVRGLSAGARVFEYMALNPCIPLSGGCCVPKEQLRGSVTFQNVCFSYPCRPGFEVLKDFTLTLPPGKIVALVGQSGGGKTTVASLLERFYDPTAGVVMLDGRDLRTLDPSWLRGQVVGFISQEPVLFGTTIMENIRFGKLEASDEEVYTAAREANAHEFITSFPEGYNTVVGERGTTLSGGQKQRLAIARALIKQPTVLILDEATSALDAESERVVQEALDRASAGRTVLVIAHRLSTVRGAHCIVVMADGRVWEAGTHEELLKKGGLYAELIRRQALDAPRTAAPPPKKPEGPRSHQHKS

SEQ ID NO: 134 - protein, 440 aa, Homo sapiens
MASLTVKAYLLGKEDAAREIRRFSFCCSPEPEAEAEAAAGPGPCERLLSRVAALFPALRPGGFQAHYRDEDGDLVAFSSDEELTMAMSYVKDDIFRIYIKEKKECRRDHRPPCAQEAPRNMVHPNVICDGCNGPVVGTRYKCSVCPDYDLCSVCEGKGLHRGHTKLAFPSPFGHLSEGFSHSRWLRKVKHGHFGWPGWEMGPPGNWSPRPPRAGEARPGPTAESASGPSEDPSVNFLKNVGESVAAALSPLGIEVDIDVEHGGKRSRLTPVSPESSSTEEKSSSQPSSCCSDPSKPGGNVEGATQSLAEQMRKIALESEGRPEEQMESDNCSGGDDDWTHLSSKEVDPSTGELQSLQMPESEGPSSLDPSQEGPTGLKEAALYPHLPPEADPRLIESLSQMLSMGFSDEGGWLTRLLQTKNYDIGAALDTIQYSKHPPPL

SEQ ID NO: 135 - protein, 180 aa, Homo sapiens
MQAEGRGTGGSTGDADGPGGPGIPDGPGGNAGGPGEAGATGGRGPRGAGAARASGPRGGAPRGPHGGAASAQDGRCPCGARRPDSRLLELHITMPFSSPMEAELVRRILSRDAAPLPRPGAVLKDFTVSGNLLFIRLTAADHRQLQLSISSCLQQLSLLMWITQCFLPVFLAQAPSGQRR

SEQ ID NO: 136 - protein, 628 aa, Homo sapiens
MAELGELKHMVMSFRVSELQVLLGFAGRNKSGRKHELLAKALHLLKSSCAPSVQMKIKELYRRRFPRKTLGPSDLSLLSLPPGTSPVGSPGPLAPIPPTLLAPGTLLGPKREVDMHPPLPQPVHPDVTMKPLPFYEVYGELIRPTTLASTSSQRFEEAHFTFALTPQQVQQILTSREVLPGAKCDYTIQVQLRFCLCETSCPQEDYFPPNLFVKVNGKLCPLPGYLPPTKNGAEPKRPSRPINITPLARLSATVPNTIVVNWSSEFGRNYSLSVYLVRQLTAGTLLQKLRAKGIRNPDHSRALIKEKLTADPDSEVATTSLRVSLMCPLGKMRLTVPCRALTCAHLQSFDAALYLQMNEKKPTWTCPVCDKKAPYESLIIDGLFMEILSSCSDCDEIQFMEDGSWCPMKPKKEASEVCPPPGYGLDGLQYSPVQGGDPSENKKKVEVIDLTIESSSDEEDLPPTKKHCSVTSAAIPALPGSKGVLTSGHQPSSVLRSPAMGTLGGDFLSSLPLHEYPPAFPLGADIQGLDLFSFLQTESQHYGPSVITSLDEQDALGHFFQYRGTPSHFLGPLAPTLGSSHCSATPAPPPGRVSSIVAPGGALREGHGGPLPSGPSLTGCRSDIISLD

SEQ ID NO: 137 - protein, 117 aa, Homo sapiens
MKWMFKEDHSLEHRCVESAKIRAKYPDRVPVIVEKVSGSQIVDIDKRKYLVPSDITVAQFMWIIRKRIQLPSEKAIFLFVDKTVPQSSLTMGQLYEKEKDEDGFLYVAYSGENTFGF

SEQ ID NO: 138 - protein, 606 aa, Homo sapiens
MSDTSESGAGLTRFQAEASEKDSSSMMQTLLTVTQNVEVPETPKASKALEVSEDVKVSKASGVSKATEVSKTPEAREAPATQASSTTQLTDTQVLAAENKSLAADTKKQNADPQAVTMPATETKKVSHVADTKVNTKAQETEAAPSQAPADEPEPESAAAQSQENQDTRPKVKAKKARKVKHLDGEEDGSSDQSQASGTTGGRRVSKALMASMARRASRGPIAFWARRASRTRLAAWARRALLSLRSPKARRGKARRRAAKLQSSQEPEAPPPRDVALLQGRANDLVKYLLAKDQTKIPIKRSDMLKDIIKEYTDVYPEIIERAGYSLEKVFGIQLKEIDKNDHLYILLSTLEPTDAGILGTTKDSPKLGLLMVLLSIIFMNGNRSSEAVIWEVLRKLGLRPGIHHSLFGDVKKLITDEFVKQKYLDYARVPNSNPPEYEFFWGLRSYYETSKMKVLKFACKVQKKDPKEWAAQYREAMEADLKAAAEAAAEAKARAEIRARMGIGLGSENAAGPCNWDEADIGPWAKARIQAGAEAKAKAQESGSASTGASTSTNNSASASASTSGGFSAGASLTATLTFGLFAGLGGAGASTSGSSGACGFSYK

SEQ ID NO: 139 - protein, 481 aa, Homo sapiens
MNEVSVIKEGWLHKRGEYIKTWRPRYFLLKSDGSFIGYKERPEAPDQTLPPLNNFSVAECQLMKTERPRPNTFVIRCLQWTTVIERTFHVDSPDEREEWMRAIQMVANSLKQRAPGEDPMDYKCGSPSDSSTTEEMEVAVSKARAKVTMNDFDYLKLLGKGTFGKVILVREKATGRYYAMKILRKEVIIAKDEVAHTVTESRVLQNTRHPFLTALKYAFQTHDRLCFVMEYANGGELFFHLSRERVFTEERARFYGAEIVSALEYLHSRDVVYRDIKLENLMLDKDGHIKITDFGLCKEGISDGATMKTFCGTPEYLAPEVLEDNDYGRAVDWWGLGVVMYEMMCGRLPFYNQDHERLFELILMEEIRFPRTLSPEAKSLLAGLLKKDPKQRLGGGPSDAKEVMEHRFFLSINWQDVVQKKLLPPFKPQVTSEVDTRYFDDEFTAQSITITPPDRYDSLGLLELDQRTHFPQFSYSASIRE

SEQ ID NO: 140 - protein, 695 aa, Homo sapiens
MADIKTGIFAKNVQKRLNRAQEKVLQKLGKADETKDEQFEEYVQNFKRQEAEGTRLQRELRGYLAAIKGMQEASMKLTESLHEVYEPDWYGREDVKMVGEKCDVLWEDFHQKLVDGSLLTLDTYLGQFPDIKNRIAKRSRKLVDYDSARHHLEALQSSKRKDESRISKAEEEFQKAQKVFEEFNVDLQEELPSLWSRRVGFYVNTFKNVSSLEAKFHKEIAVLCHKLYEVMTKLGDQHADKAFTIQGAPSDSGPLRIAKTPSPPEEPSPLPSPTASPNHTLAPASPAPARPRSPSQTRKGPPVPPLPKVTPTKELQQENIISFFEDNFVPEISVTTPSQNEVPEVKKEETLLDLDFDPFKPEVTPAGSAGVTHSPMSQTLPWDLWTTSTDLVQPASGGSFNGFTQPQDTSLFTMQTDQSMICNLAESEQAPPTEPKAEEPLAAVTPAVGLDLGMDTRAEEPVEEAVIIPGADADAAVGTLVSAAEGAPGEEAEAEKATVPAGEGVSLEEAKIGTETTEGAESAQPEAEELEATVPQEKVIPSVVIEPASNHEEEGENEITIGAEPKETTEDAAPPGPTSETPELATEQKPIQDPQPTPSAPAMGAADQLASAREASQELPPGFLYKVETLHDFEAANSDELTLQRGDVVLVVPSDSEADQDAGWLVGVKESDWLQYRDLATYKGLFPENFTRRLD

SEQ ID NO: 141 - protein, 525 aa, Homo sapiens
MAAGGSGGRASCPPGVGVGPGTGGSPGPSANAAATPAPGNAAAAAAAAAAAAAAPGPTPPAPPGPGTDAQAAGAERAEEAAGPGAAALQREAAYNWQASKPTVQERFAFLFNNEVLCDVHFLVGKGLSSQRIPAHRFVLAVGSAVFDAMFNGGMATTSTEIELPDVEPAAFLALLKFLYSDEVQIGPETVMTTLYTAKKYAVPALEAHCVEFLKKNLRADNAFMLLTQARLFDEPQLASLCLENIDKNTADAITAEGFTDIDLDTLVAVLERDTLGIREVRLFNAVVRWSEAECQRQQLQVTPENRRKVLGKALGLIRFPLMTIEEFAAGPAQSGILVDREVVSLFLHFTVNPKPRVEFIDRPRCCLRGKECSINRFQQVESRWGYSGTSDRIRFSVNKRIFVVGFGLYGSIHGPTDYQVNIQIIHTDSNTVLGQNDTGFSCDGSASTFRVMFKEPVEVLPNVNYTACATLKGPDSHYGTKGLRKVTHESPTTGAKTCFTFCYAAGNNNGTSVEDGQIPEVIFYT

SEQ ID NO: 142 - protein, 354 aa, Homo sapiens
MAESPTEEAATAGAGAAGPGASSVAGVVGVSGSGGGFGPPFLPDVWAAAAAAGGAGGPGSGLAPLPGLPPSAAAHGAALLSHWDPTLSSDWDGERTAPQCLLRIKRDIMSIYKEPPPGMFVVPDTVDMTKIHALITGPFDTPYEGGFFLFVFRCPPDYPIHPPRVKLMTTGNNTVRFNPNFYRNGKVCLSILGTWTGPAWSPAQSISSVLISIQSLMTENPYHNEPGFEQERHPGDSKNYNECIRHETIRVAVCDMMEGKCPCPEPLRGVMEKSFLEYYDFYEVACKDRLHLQGQTMQDPFGEKRGHFDYQSLLMRLGLIRQKVLERLHNENAEMDSDSSSSGTETDLHGSLRV

SEQ ID NO: 143 - protein, 317 aa, Homo sapiens
MPREDRATWKSNYFLKIIQLLDDYPKCFIVGADNVGSKQMQQIRMSLRGKAVVLMGKNTMMRKAIRGHLENNPALEKLLPHIRGNVGFVFTKEDLTEIRDMLLANKVPAAARAGAIAPCEVTVPAQNTGLGPEKTSFFQALGITTKISRGTIEILSDVQLIKTGDKVGASEATLLNMLNISPFSFGLVIQQVFDNGSIYNPEVLDITEETLHSRFLEGVRNVASVCLQIGYPTVASVPHSIINGYKRVLALSVETDYTFPLAEKVKAFLADPSAFVAAAPVAAATTAAPAAAAAPAKVEAKEESEESDEDMGFGLFD

SEQ ID NO: 144 - protein, 158 aa, Homo sapiens
MMRFMLLFSRQGKLRLQKWYLATSDKERKKMVRELMQVVLARKPKMCSFLEWRDLKVVYKRYASLYFCCAIEGQDNELITLELIHRYVELLDKYFGSVCELDIIFNFEKAYFILDEFLMGGDVQDTSKKSVLKAIEQADLLQEEDESPRSVLEEMGLA

SEQ ID NO: 145 - protein, 1165 aa, Homo sapiens
MICQKFCVVLLHWEFIYVITAFNLSYPITPWRFKLSCMPPNSTYDYFLLPAGLSKNTSNSNGHYETAVEPKFNSSGTHFSNLSKTTFHCCFRSEQDRNCSLCADNIEGKTFVSTVNSLVFQQIDANWNIQCWLKGDLKLFICYVESLFKNLFRNYNYKVHLLYVLPEVLEDSPLVPQKGSFQMVHCNCSVHECCECLVPVPTAKLNDTLLMCLKITSGGVIFQSPLMSVQPINMVKPDPPLGLHMEITDDGNLKISWSSPPLVPFPLQYQVKYSENSTTVIREADKIVSATSLLVDSILPGSSYEVQVRGKRLDGPGIWSDWSTPRVFTTQDVIYFPPKILTSVGSNVSFHCIYKKENKIVPSKEIVWWMNLAEKIPQSQYDVVSDHVSKVTFFNLNETKPRGKFTYDAVYCCNEHECHHRYAELYVIDVNINISCETDGYLTKMTCRWSTSTIQSLAESTLQLRYHRSSLYCSDIPSIHPISEPKDCYLQSDGFYECIFQPIFLLSGYTMWIRINHSLGSLDSPPTCVLPDSVVKPLPPSSVKAEITINIGLLKISWEKPVFPENNLQFQIRYGLSGKEVQWKMYEVYDAKSKSVSLPVPDLCAVYAVQVRCKRLDGLGYWSNWSNPAYTVVMDIKVPMRGPEFWRIINGDTMKKEKNVTLLWKPLMKNDSLCSVQRYVINHHTSCNGTWSEDVGNHTKFTFLWTEQAHTVTVLAINSIGASVANFNLTFSWPMSKVNIVQSLSAYPLNSSCVIVSWILSPSDYKLMYFIIEWKNLNEDGEIKWLRISSSVKKYYIHDHFIPIEKYQFSLYPIFMEGVGKPKIINSFTQDDIEKHQSDAGLYVIVPVIISSSILLLGTLLISHQRMKKLFWEDVPNPKNCSWAQGLNFQKPETFEHLFIKHTASVTCGPLLLEPETISEDISVDTSWKNKDEMMPTTVVSLLSTTDLEKGSVCISDQFNSVNFSEAEGTEVTYEDESQRQPFVKYATLISNSKPSETGEEQGLINSSVTKCFSSKNSPLKDSFSNSSWEIEAQAFFILSDQHPNIISPHLTFSEGLDELLKLEGNFPEENNDKKSIYYLGVTSIKKRESGVLLTDKSRVSCPFPAPCLFTDIRVLQDSCSHFVENNINLGTSSKKTFASYMPQFQTCSTQTHKIMENKMCDLTV

SEQ ID NO: 146 - protein, 189 aa, Homo sapiens
MLGSRAVMLLLLLPWTAQGRAVPGGSSPAWTQCQQLSQKLCTLAWSAHPLVGHMDLREEGDEETTNDVPHIQCGDGCDPQGLRDNSQFCLQRIHQGLIFYEKLLGSDIFTGEPSLLPDSPVGQLHASLLGLSQLLQPEGHHWETQQIPSLSPSQPWQRLLLRFKILRSLQAFVAVAARVFAHGAATLSP

SEQ ID NO: 147 - protein, 393 aa, Homo sapiens [sequence omitted]

SEQ ID NO: 148 - protein, 148 aa, Homo sapiens
MRGRELPLVLLALVLCLAPRGRAVPLPAGGGTVLTKMYPRGNHWAVGHLMGKKSTGESSSVSERGSLKQQLREYIRWEEAARNLLGLIEAKENRNHQPPQPKALGNQQPSWDSEDSSNFKDVGSKGKVGRLSAPGSQREGRNPQLNQQ

SEQ ID NO: 149 - protein, 596 aa, Homo sapiens
MPTQRDSSTMSHTVAGGGSGDHSHQVRVKAYYRGDIMITHFEPSISFEGLCNEVRDMCSFDNEQLFTMKWIDEEGDPCTVSSQLELEEAFRLYELNKDSELLIHVFPCVPERPGMPCPGEDKSIYRRGARRWRKLYCANGHTFQAKRFNRRAHCAICTDRIWGLGRQGYKCINCKLLVHKKCHKLVTIECGRHSLPQEPVMPMDQSSMHSDHAQTVIPYNPSSHESLDQVGEEKEAMNTRESGKASSSLGLQDFDLLRVIGRGSYAKVLLVRLKKTDRIYAMKVVKKELVNDDEDIDWVQTEKHVFEQASNHPFLVGLHSCFQTESRLFFVIEYVNGGDLMFHMQRQRKLPEEHARFYSAEISLALNYLHERGIIYRDLKLDNVLLDSEGHIKLTDYGMCKEGLRPGDTTSTFCGTPNYIAPEILRGEDYGFSVDWWALGVLMFEMMAGRSPFDIVGSSDNPDQNTEDYLFQVILEKQIRIPRSLSVKAASVLKSFLNKDPKERLGCHPQTGFADIQGHPFFRNVDWDMMEQKQVVPPFKPNISGEFGLDNFDSQFTNEPVQLTPDDDDIVRKIDQSEFEGFEYINPLLMSAEECV

SEQ ID NO: 150 - protein, 983 aa, Homo sapiens
MTDSKYFTTNKKGEIFELKAELNNEKKEKRKEAVKKVIAAMTVGKDVSSLFPDVVNCMQTDNLELKKLVYLYLMNYAKSQPDMAIMAVNSFVKDCEDPNPLIRALAVRTMGCIRVDKITEYLCEPLRKCLKDEDPYVRKTAAVCVAKLHDINAQMVEDQGFLDSLRDLIADSNPMVVANAVAALSEISESHPNSNLLDLNPQNINKLLTALNECTEWGQIFILDCLSNYNPKDDREAQSICERVTPRLSHANSAVVLSAVKVLMKFLELLPKDSDYYNMLLKKLAPPLVTLLSGEPEVQYVALRNINLIVQKRPEILKQEIKVFFVKYNDPIYVKLEKLDIMIRLASQANIAQVLAELKEYATEVDVDFVRKAVRAIGRCAIKVEQSAERCVSTLLDLIQTKVNYVVQEAIVVIRDIFRKYPNKYESIIATLCENLDSLDEPDARAAMIWIVGEYAERIDNADELLESFLEGFHDESTQVQLTLLTAIVKLFLKKPSETQELVQQVLSLATQDSDNPDLRDRGYIYWRLLSTDPVTAKEVVLSEKPLISEETDLIEPTLLDELICHIGSLASVYHKPPNAFVEGSHGIHRKHLPIHHGSTDAGDSPVGTTTATNLEQPQVIPSQGDLLGDLLNLDLGPPVNVPQVSSMQMGAVDLLGGGLDSLLGSDLGGGIGGSPAVGQSFIPSSVPATFAPSPTPAVVSSGLNDLFELSTGIGMAPGGYVAPKAVWLPAVKAKGLEISGTFTHRQGHIYMEMNFTNKALQHMTDFAIQFNKNSFGVIPSTPLAIHTPLMPNQSIDVSLPLNTLGPVMKMEPLNNLQVKSKENNWMDTSGRENANIMEKGIQAPFKVRKVAVKNNIDVFYFSCLIPLNVLFVEDGKMERQVFLATWKDIPNENELQFQIKECHLNADTVSSKLQNNNVYTIAKRNVEGQDMLYQSLKLTNGIWILAELRIQPGNPNYTLSLKCRAPEVSQYIYQVYDSILKN

SEQ ID NO: 151 - protein, 1257 aa, Homo sapiens
MVVALRYVWPLLLCSPCLLIQIPEEYEGHHVMEPPVITEQSPRRLVVFPTDDISLKCEASGKPEVQFRWTRDGVHFKPKEELGVTVYQSPHSGSFTITGNNSNFAQRFQGIYRCFASNKLGTAMSHEIRLMAEGAPKWPKETVKPVEVEEGESVVLPCNPPPSAEPLRIYWMNSKILHIKQDERVTMGQNGNLYFANVLTSDNHSDYICHAHFPGTRTIIQKEPIDLRVKATNSMIDRKPRLLFPTNSSSHLVALQGQPLVLECIAEGFPTPTIKWLRPSGPMPADRVTYQNHNKTLQLLKVGEEDDGEYRCLAENSLGSARHAYYVTVEAAPYWLHKPQSHLYGPGETARLDCQVQGRPQPEVTWRINGIPVEELAKDQKYRIQRGALILSNVQPSDTMVTQCEARNRHGLLLANAYIYVVQLPAKILTADNQTYMAVQGSTAYLLCKAFGAPVPSVQWLDEDGTTVLQDERFFPYANGTLGIRDLQANDTGRYFCLAANDQNNVTIMANLKVKDATQITQGPRSTIEKKGSRVTFTCQASFDPSLQPSITWRGDGRDLQELGDSDKYFIEDGRLVIHSLDYSDQGNYSCVASTELDVVESRAQLLVVGSPGPVPRLVLSDLHLLTQSQVRVSWSPAEDHNAPIEKYDIEFEDKEMAPEKWYSLGKVPGNQTSTTLKLSPYVHYTFRVTAINKYGPGEPSPVSETVVTPEAAPEKNPVDVKGEGNETTNMVITWKPLRWMDWNAPQVQYRVQWRPQGTRGPWQEQIVSDPFLVVSNTSTFVPYEIKVQAVNSQGKGPEPQVTIGYSGEDYPQAIPELEGIEILNSSAVLVKWRPVDLAQVKGHLRGYNVTYWREGSQRKHSKRHIHKDHVVVPANTTSVILSGLRPYSSYHLEVQAFNGRGSGPASEFTFSTPEGVPGHPEALHLECQSNTSLLLRWQPPLSHNGVLTGYVLSYHPLDEGGKGQLSFNLRDPELRTHNLTDLSPHLRYRFQLQATTKEGPGEAIVREGGTMALSGISDFGNISATAGENYSVVSWVPKEGQCNFRFHILFKALGEEKGGASLSPQYVSYNQSSYTQWDLQPDTDYEIHLFKERMFRHQMAVKTNGTGRVRLPPAGFATEGWFIGFVSAIILLLLVLLILCFIKRSKGGKYSVKDKEDTQVDSEARPMKDETFGEYRSLESDNEEKAFGSSQPSLNGDIKPLGSDDSLADYGGSVDVQFNEDGSFIGQYSGKKEKEAAGGNDSSGATSPINPAVALE

SEQ ID NO: 152 - protein, 538 aa, Homo sapiens
MEGGRRARVVIESKRNFFLGAFPTPFPAEHVELGRLGDSETAMVPGKGGADYILLPFKKMDFSRNLYDIGEQLDSEDLASLKFLSLDYIPQRKQEPIKDALMLFQRLQEKRMLEESNLSFLKELLFRINRLDLLITYLNTRKEEMERELQTPGRAQISAYRVMLYQISEEVSRSELRSFKFLLQEEISKCKLDDDMNLLDIFIEMEKRVILGEGKLDILKRVCAQINKSLLKIINDYEEFSKERSSSLEGSPDEFSNGEELCGVMTISDSPREQDSESQTLDKVYQMKSKPRGYCLIINNHNFAKAREKVPKLHSIRDRNGTHLDAGALTTTFEELHFEIKPHDDCTVEQIYEILKIYQLMDHSNMDCFICCILSHGDKGIIYGTDGQEAPIYELTSQFTGLKCPSLAGKPKVFFIQACQGDNYQKGIPVETDSEEQPYLEMDLSSPQTRYIPDEADFLLGMATVNNCVSYRNPAEGTWYIQSLCQSLRERCPRGDDILTILTEVNYEVSNKDDKKNMGKQMPQPTFTLRKKLVFPSD

SEQ ID NO: 153 - protein, 764 aa, Homo sapiens
MGSNLSPQLCLMPFILGLLSGGVTTTPWSLARPQGSCSLEGVEIKGGSFRLLQEGQALEYVCPSGFYPYPVQTRTCRSTGSWSTLKTQDQKTVRKAECRAIHCPRPHDFENGEYWPRSPYYNVSDEISFHCYDGYTLRGSANRTCQVNGRWSGQTAICDNGAGYCSNPGIPIGTRKVGSQYRLEDSVTYHCSRGLTLRGSQRRTCQEGGSWSGTEPSCQDSFMYDTPQEVAEAFLSSLTETIEGVDAEDGHGPGEQQKRKIVLDPSGSMNIYLVLDGSDSIGASNFTGAKKCLVNLIEKVASYGVKPRYGLVTYATYPKIWVKVSEADSSNADWVTKQLNEINYEDHKLKSGTNTKKALQAVYSMMSWPDDVPPEGWNRTRHVIILMTDGLHNMGGDPITVIDEIRDLLYIGKDRKNPREDYLDVYVFGVGPLVNQVNINALASKKDNEQHVFKVKDMENLEDVFYQMIDESQSLSLCGMVWEHRKGTDYHKQPWQAKISVIRPSKGHESCMGAVVSEYFVLTAAHCFTVDDKEHSIKVSVGGEKRDLEIEVVLFHPNYNINGKKEAGIPEFYDYDVALIKLKNKLKYGQTIRPICLPCTEGTTRALRLPPTTTCQQQKEELLPAQDIKALFVSEEEKKLTRKEVYIKNGDKKGSCERDAQYAPGYDKVKDISEVVTPRFLCTGGVSPYADPNTCRGDSGGPLIVHKRSRFIQVGVISWGVVDVCKNQKRQKQVPAHARDFHINLFQVLPWLKEKLQDEDLGFL

SEQ ID NO: 154 - protein, 1060 aa, Homo sapiens
MDSGAGGRRCPEAALLILGPPRMEHLRHSPGPGGQRLLLPSMLLALLLLLAPSPGHATRVVYKVPEEQPPNTLIGSLAADYGFPDVGHLYKLEVGAPYLRVDGKTGDIFTTETSIDREGLRECQNQLPGDPCILEFEVSITDLVQNGSPRLLEGQIEVQDINDNTPNFASPVITLAIPENTNIGSLFPIPLASDRDAGPNGVASYELQAGPEAQELFGLQVAEDQEEKQPQLIVMGNLDRERWDSYDLTIKVQDGGSPPRASSALLRVTVLDTNDNAPKFERPSYEAELSENSPIGHSVIQVKANDSDQGANAEIEYTFHQAPEVVRRLLRLDRNTGLITVQGPVDREDLSTLRFSVLAKDRGTNPKSARAQVVVTVKDMNDNAPTIEIRGIGLVTHQDGMANISEDVAEETAVALVQVSDRDEGENAAVTCVVAGDVPFQLRQASETGSDSKKKYFLQTTTPLDYEKVKDYTIEIVAVDSGNPPLSSTNSLKVQVVDVNDNAPVFTQSVTEVAFPENNKPGEVIAEITASDADSGSNAELVYSLEPEPAAKGLFTISPETGEIQVKTSLDREQRESYELKVVAADRGSPSLQGTATVLVNVLDCNDNDPKFMLSGYNFSVMENMPALSPVGMVTVIDGDKGENAQVQLSVEQDNGDFVIQNGTGTILSSLSFDREQQSTYTFQLKAVDGGVPPRSAYVGVTINVLDENDNAPYITAPSNTSHKLLTPQTRLGETVSQVAAEDFDSGVNAELIYSIAGGNPYGLFQIGSHSGAITLEKEIERRHHGLHRLVVKVSDRGKPPRYGTALVHLYVNETLANRTLLETLLGHSLDTPLDIDIAGDPEYERSKQRGNILFGVVAGVVAVALLIALAVLVRYCRQREAKSGYQAGKKETKDLYAPKPSGKASKGNKSKGKKSKSPKPVKPVEDEDEAGLQKSLKFNLMSDAPGDSPRIHLPLNYPPGSPDLGRHYRSNSPLPSIQLQPQSPSASKKHQVVQDLPPANTFVGTGDTTSTGSEQYSDYSYRTNPPKYPSKQVGQPFQLSTPQPLPHPYHGAIWTEVWE

SEQ ID NO: 155 - protein, 2364 aa, Homo sapiens
MTTTVATDYDNIEIQQQYSDVNNRWDVDDWDNENSSARLFERSRIKALADEREAVQKKTFTKWVNSHLARVSCRITDLYTDLRDGRMLIKLLEVLSGERLPKPTKGRMRIHCLENVDKALQFLKEQRVHLENMGSHDIVDGNHRLTLGLIWTIILRFQIQDISVETEDNKEKKSAKDALLLWCQMKTAGYPNVNIHNFTTSWRDGMAFNALIHKHRPDLIDFDKLKKSNAHYNLQNAFNLAEQHLGLTKLLDPEDISVDHPDEKSIITYVVTYYHYFSKMKALAVEGKRIGKVLDNAIETEKMIEKYESLASDLLEWIEQTIIILNNRKFANSLVGVQQQLQAFNTYRTVEKPPKFTEKGNLEVLLFTIQSKMRANNQKVYMPREGKLISDINKAWERLEKAEHERELALRNELIRQEKLEQLARRFDRKAAMRETWLSENQRLVSQDNFGFDLPAVEAATKKHEAIETDIAAYEERVQAVVAVARELEAENYHDIKRITARKDNVIRLWEYLLELLRARRQRLEMNLGLQKIFQEMLYIMDWMDEMKVLVLSQDYGKHLLGVEDLLQKHTLVEADIGIQAERVRGVNASAQKFATDGEGYKPCDPQVIRDRVAHMEFCYQELCQLAAERRARLEESRRLWKFFWEMAEEEGWIREKEKILSSDDYGKDLTSVMRLLSKHRAFEDEMSGRSGHFEQAIKEGEDMIAEEHFGSEKIRERIIYIREQWANLEQLSAIRKKRLEEASLLHQFQADADDIDAWMLDILKIVSSSDVGHDEYSTQSLVKKHKDVAEEIANYRPTLDTLHEQASALPQEHAESPDVRGRLSGIEERYKEVAELTRLRKQALQDTLALYKMFSEADACELWIDEKEQWLNNMQIPEKLEDLEVIQHRFESLEPEMNNQASRVAVVNQIARQLMHSGHPSEKEIKAQQDKLNTRWSQFRELVDRKKDALLSALSIQNYHLECNETKSWIREKTKVIESTQDLGNDLAGVMALQRKLTGMERDLVAIEAKLSDLQKEAEKLESEHPDQAQAILSRLAEISDVWEEMKTTLKNREASLGEASKLQQFLRDLDDFQSWLSRTQTAIASEDMPNTLTEAEKLLTQHENIKNEIDNYEEDYQKMRDMGEMVTQGQTDAQYMFLRQRLQALDTGWNELHKMWENRQNLLSQSHAYQQFLRDTKQAEAFLNNQEYVLAHTEMPTTLEGAEAAIKKQEDFMTTMDANEEKINAVVETGRRLVSDGNINSDRIQEKVDSIDDRHRKNRETASELLMRLKDNRDLQKFLQDCQELSLWINEKMLTAQDMSYDEARNLHSKWLKHQAFMAELASNKEWLDKIEKEGMQLISEKPETEAVVKEKLTGLHKMWEVLESTTQTKAQRLFDANKAELFTQSCADLDKWLHGLESQIQSDDYGKDLTSVNILLKKQQMLENQMEVRKKEIEELQSQAQALSQEGKSTDEVDSKRLTVQTKFMELLEPLNERKHNLLASKEIHQFNRDVEDEILWVGERMPLATSTDHGHNLQTVQLLIKKNQTLQKEIQGHQPRIDDIFERSQNIVTDSSSLSAEAIRQRLADLKQLWGLLIEETEKRHRRLEEAHRAQQYYFDAAEAEAWMSEQELYMMSEEKAKDEQSAVSMLKKHQILEQAVEDYAETVHQLSKTSRALVADSHPESERISMRQSKVDKLYAGLKDLAEERRGKLDERHRLFQLNREVDDLEQWIAEREVVAGSHELGQDYEHVTMLQERFREFARDTGNIGQERVDTVNHLADELINSGHSDAATIAEWKDGLNEAWADLLELIDTRTQILAASYELHKFYHDAKEIFGRIQDKHKKLPEELGRDQNTVETLQRMHTTFEHDIQALGTQVRQLQEDAARLQAAYAGDKADDIQKRENEVLEAWKSLLDACESRRVRLVDTGDKFRFFSMVRDLMLWMEDVIRQIEAQEKPRDVSSVELLMNNHQGIKAEIDARNDSFTTCIELGKSLLARKHYASEEIKEKLLQLTEKRKEMIDKWEDRWEWLRLILEVHQFSRDASVAEAWLLGQEPYLSSREIGQSVDEVEKLIKRHEAFEKSAATWDERFSALERLTTLELLEVRRQQEEEERKRRPPSPEPSTKVSEEAESQQQWDTSKGEQVSQNGLPAEQGSPRMAETVDTSEMVNGATEQRTSSKESSPIPSPTSDRKAKTALPAQSAATLPARTQETPSAQMEGFLNRKHEWEAHNKKASSRSWHNVYCVINNQEMGFYKDAKTAASGIPYHSEVPVSLKEAVCEVALDYKKKKHVFKLRLNDGNEYLFQAKDDEEMNTWIQAISSAISSDKHEVSASTQSTPASSRAQTLPTSVVTITSESSPGKREKDKEKDKEKRFSLFGKKK

SEQ ID NO: 156 - protein, 152 aa, Homo sapiens
MSRLPVLLLLQLLVRPGLQAPMTQTTPLKTSWVNCSNMIDEIITHLKQPPLPLLDFNNLNGEDQDILMENNLRRPNLEAFNRAVKSLQNASAIESILKNLLPCLPLATAAPTRHPIHIKDGDWNEFRRKLTFYLKTLENAQAQQTTLSLAIF

SEQ ID NO: 157 - protein, 226 aa, Homo sapiens
METVVIVAIGVLATIFLASFAALVLVCRQRYCRPRDLLQRYDSKPIVDLIGAMETQSEPSELELDDVVITNPHIEAILENEDWIEDASGLMSHCIAILKICHTLTEKLVAMTMGSGAKMKTSASVSDIIVVAKRISPRVDDVVKSMYPPLDPKLLDARTTALLLSVSHLVLVTRNACHLTGGLDWIDQSLSAAEEHLEVLREAALASEPDKGLPGPEGFLQEQSAI

SEQ ID NO: 158 - protein, 430 aa, Homo sapiens
MKPSLLCRPLSCFLMLLPWPLATLTSTTLWQCPPGEEPDLDPGQGTLCRPCPPGTFSAAWGSSPCQPHARCSLWRRLEAQVGMATRDTLCGDCWPGWFGPWGVPRVPCQPCSWAPLGTHGCDEWGRRARRGVEVAAGASSGGETRQPGNGTRAGGPEETAAQYAVIAIVPVFCLMGLLGILVCNLLKRKGYHCTAHKEVGPGPGGGGSGINPAYRTEDANEDTIGVLVRLITEKKENAAALEELLKEYHSKQLVQTSHRPVSKLPPAPPNVPHICPHRHHLHTVQGLASLSGPCCSRCSQKKWPEVLLSPEAVAATTPVPSLLPNPTRVPKAGAKAGRQGEITILSVGRFRVARIPEQRTSSMVSEVKTITEAGPSWGDLPDSPQPGLPPEQQALLGSGGSRTKWLKPPAENKAEENRYVVRLSESNLVI

SEQ ID NO: 159 - protein, 1164 aa, Homo sapiens
MEPNDSTSTAVEEPDSLEVLVKTLDSQTRTFIVGAQMNVKEFKEHIAASVSIPSEKQRLIYQGRVLQDDKKLQEYNVGGKVIHLVERAPPQTHLPSGASSGTGSASATHGGGSPPGTRGPGASVHDRNANSYVMVGTFNLPSEPRVRLVMAQHMIRDIQTLLSRMECRGGPQPQHSQPPPQPPAVTPEPVALSSQTSEPVESEAPPREPMEAEEVEERAPAQNPELTPGPAPAGPTPAPETNAPNHPSPAEYVEVLQELQRLESRLQPFLQRYYEVLGAAATTDYNNNHEGREEDQRLINLVGESLRLLGNTFVALSDLRCNLACTPPRHLHVVRPMSHYTTPMVLQQAAIPIQINVGTTVTMTGNGTRPPPTPNAEAPPPGPGQASSVAPSSTNVESSAEGAPPPGPAPPPATSHPRVIRISHQSVEPVVMMHMNIQGPLSLSPCPDSGTQPGGVPSAPTGPLGPPGHGQTLGSTLIQLPSLPPEFMHAVAHQITHQAMVAAVASAAAALFGLSLLPPTGQQVPGFPTAPTRVVIARPTPPQARPSHPGGPPVSGTLQGAGLGTNASLAQMVSGLVGQLLMQPVLVAQGTPGMAPPPAPATASASAGTTNTATTAGPAPGGPAQPPPTPQPSMADLQFSQLLGNLLGPAGPGAGGSGVASPTITVAMPGVPAFLQGMTDFLQATQTAPPPPPPPPPPPPAPEQQTMPPPGSPSGGAGSPGGLGLESLSPEFFTSVVQGVLSSLLGSLGARAGSSESIAAFIQRLSGSSNIFEPGADGALGFFGALLSLLCQNFSMVDVVMLLHGHFQPLQRLQPQLRSFFHQHYLGGQEPTPSNIRMATHTLITGLEEYVRESFSLVQVQPGVDIIRTNLEFLQEQFNSIAAHVLHCTDSGFGARLLELCNQGLFECLALNLHCLGGQQMELAAVINGRIRRMSRGVNPSLVSWLTTMMGLRLQVVLEHMPVGPDAILRYVRRVGDPPQPLPEEPMEVQGAERASPEPQRENASPAPGTTAEEAMSRGPPPAPEGGSRDEQDGASAETEPWAAAVPPEWVPIIQQDIQSQRKVKPQPPLSDAYLSGMPAKRRKTMQGEGPQLLLSEAVSRAAKAAGARPLTSPESLSRDLEAPEVQESYRQQLRSDIQKRLQEDPNYSPQRFPNAQRAFADDP

SEQ ID NO: 160 - protein, 1064 aa, Homo sapiens
MASESETLNPSARIMTFYPTMEEFRNFSRYIAYIESQGAHRAGLAKVVPPKEWKPRASYDDIDDLVIPAPIQQLVTGQSGLFTQYNIQKKAMTVREFRKIANSDKYCTPRYSEFEELERKYWKNLTFNPPIYGADVNGTLYEKHVDEWNIGRLRTILDLVEKESGITIEGVNTPYLYFGMWKTSFAWHTEDMDLYSINYLHFGEPKSWYSVPPEHGKRLERLAKGFFPGSAQSCEAFLRHKMTLISPLMLKKYGIPFDKVTQEAGEFMITFPYGYHAGFNHGFNCAESTNFATRRWIEYGKQAVLCSCRKDMVKISMDVFVRKFQPERYKLWKAGKDNTVIDHTLPTPEAAEFLKESELPPRAGNEEECPEEDMEGVEDGEEGDLKTSLAKHRIGTKRHRVCLEIPQEVSQSELFPKEDLSSEQYEMTECPAALAPVRPTHSSVRQVEDGLTFPDYSDSTEVKFEELKNVKLEEEDEEEEQAAAALDLSVNPASVGGRLVFSGSKKKSSSSLGSGSSRDSISSDSETSEPLSCRAQGQTGVLTVHSYAKGDGRVTVGEPCTRKKGSAARSFSERELAEVADEYMFSLEENKKSKGRRQPLSKLPRHHPLVLQECVSDDETSEQLTPEEEAEETEAWAKPLSQLWQNRPPNFEAEKEFNETMAQQAPHCAVCMIFQTYHQVEFGGFNQNCGNASDLAPQKQRTKPLIPEMCFTSTGCSTDINLSTPYLEEDGTSILVSCKKCSVRVHASCYGVPPAKASEDWMCSRCSANALEEDCCLCSLRGGALQRANDDRWVHVSCAVAILEARFVNIAERSPVDVSKIPLPRFKLKCIFCKKRRKRTAGCCVQCSHGRCPTAFHVSCAQAAGVMMQPDDWPFVVFITCFRHKIPNLERAKGALQSITAGQKVISKHKNGRFYQCEVVRLTTETFYEVNFDDGSFSDNLYPEDIVSQDCLQFGPPAEGEVVQVRWTDGQVYGAKFVASHPIQMYQVEFEDGSQLVVKRDDVYTLDEELPKRVKSRLSVASDMRFNEIFTEKEVKQEKKRQRVINSRYREDYIEPALYRAIME

SEQ ID NO: 161 - protein, 764 aa, Homo sapiens
MNGEADCPTDLEMAAPKGQDRWSQEDMLTLLECMKNNLPSNDSSKFKTTESHMDWEKVAFKDFSGDMCKLKWVEISNEVRKFRTLTELILDAQEHVKNPYKGKKLKKHPDFPKKPLTPYFRFFMEKRAKYAKLHPEMSNLDLTKILSKKYKELPEKKKMKYIQDFQREKQEFERNLARFREDHPDLIQNAKKSDIPEKPKTPQQLWYTHEKKVYLKVRPDATTKEVKDSLGKQWSQLSDKKRLKWIHKALEQRKEYEEIMRDYIQKHPELNISEEGITKSTLTKAERQLKDKFDGRPTKPPPNSYSLYCAELMANMKDVPSTERMVLCSQQWKLLSQKEKDAYHKKCDQKKKDYEVELLRFLESLPEEEQQRVLGEEKMLNINKKQATSPASKKPAQEGGKGGSEKPKRPVSAMFIFSEEKRRQLQEERPELSESELTRLLARMWNDLSEKKKAKYKAREAALKAQSERKPGGEREERGKLPESPKRAEEIWQQSVIGDYLARFKNDRVKALKAMEMTWNNMEKKEKLMWIKKAAEDQKRYERELSEMRAPPAATNSSKKMKFQGEPKKPPMNGYQKFSQELLSNGELNHLPLKERMVEIGSRWQRISQSQKEHYKKLAEEQQKQYKVHLDLWVKSLSPQDRAAYKEYISNKRKSMTKLRGPNPKSSRTTLQSKSESEEDDEEDEDDEDEDEEEEDDENGDSSEDGGDSSESSSEDESEDGDENEEDDEDEDDDEDDDEDEDNESEGSSSSSSSSGDSSDSDSN

SEQ ID NO: 162 - protein, 855 aa, Homo sapiens
MSAPSEEEEYARLVMEAQPEWLRAEVKRLSHELAETTREKIQAAEYGLAVLEEKHQLKLQFEELEVDYEAIRSEMEQLKEAFGQAHTNHKKVAADGESREESLIQESASKEQYYVRKVLELQTELKQLRNVLTNTQSENERLASVAQELKEINQNVEIQRGRLRDDIKEYKFREARLLQDYSELEEENISLQKQVSVLRQNQVEFEGLKHEIKRLEEETEYLNSQLEDAIRLKEISERQLEEALETLKTEREQKNSLRKELSHYMSINDSFYTSHLHVSLDGLKFSDDAAEPNNDAEALVNGFEHGGLAKLPLDNKTSTPKKEGLAPPSPSLVSDLLSELNISEIQKLKQQLMQMEREKAGLLATLQDTQKQLEHTRGSLSEQQEKVTRLTENLSALRRLQASKERQTALDNEKDRDSHEDGDYYEVDINGPEILACKYHVAVAEAGELREQLKALRSTHEAREAQHAEEKGRYEAEGQALTEKVSLLEKASRQDRELLARLEKELKKVSDVAGETQGSLSVAQDELVTFSEELANLYHHVCMCNNETPNRVMLDYYREGQGGAGRTSPGGRTSPEARGRRSPILLPKGLLAPEAGRADGGTGDSSPSPGSSLPSPLSDPRREPMNIYNLIAIIRDQIKHLQAAVDRTTELSRQRIASQELGPAVDKDKEALMEEILKLKSLLSTKREQITTLRTVLKANKQTAEVALANLKSKYENEKAMVTETMMKLRNELKALKEDAATFSSLRAMFATRCDEYITQLDEMQRQLAAAEDEKKTLNSLLRMAIQQKLALTQRLELLELDHEQTRRGRAKAAPKTKPATPSVSHTCACASDRAEGTGLANQVFCSEKHSIYCD

SEQ ID NO: 163 - protein, 825 aa, Homo sapiens
MGWLCSGLLFPVSCLVLLQVASSGNMKVLQEPTCVSDYMSISTCEWKMNGPTNCSTELRLLYQLVFLLSEAHTCIPENNGGAGCVCHLLMDDVVSADNYTLDLWAGQQLLWKGSFKPSEHVKPRAPGNLTVHTNVSDTLLLTWSNPYPPDNYLYNHLTYAVNIWSENDPADFRIYNVTYLEPSLRIAASTLKSGISYRARVRAWAQCYNTTWSEWSPSTKWHNSYREPFEQHLLLGVSVSCIVILAVCLLCYVSITKIKKEWWDQIPNPARSRLVAIIIQDAQGSQWEKRSRGQEPAKCPHWKNCLTKLLPCFLEHNMKRDEDPHKAAKEMPFQGSGKSAWCPVEISKTVLWPESISVVRCVELFEAPVECEEEEEVEEEKGSFCASPESSRDDFQEGREGIVARLTESLFLDLLGEENGGFCQQDMGESCLLPPSGSTSAHMPWDEFPSAGPKEAPPWGKEQPLHLEPSPPASPTQSPDNLTCTETPLVIAGNPAYRSFSNSLSQSPCPRELGPDPLLARHLEEVEPEMPCVPQLSEPTTVPQPEPETWEQILRRNVLQHGAAAAPVSAPTSGYQEFVHAVEQGGTQASAVVGLGPPGEAGYKAFSSLLASSAVSPEKCGFGASSGEEGYKPFQDLIPGCPGDPAPVPVPLFTFGLDREPPRSPQSSHLPSSSPEHLGLEPGEKVEDMPKPPLPQEQATDPLVDSLGSGIVYSALTCHLCGHLKQCHGQEDGGQTPVMASPCCGCCCGDRSSPPTTPLRAPDPSPGGVPLEASLCPASLAPSGISEKSKSSSSFHPAPGNAQSSSQTPKIVNFVSVGPTYMRVS

SEQ ID NO: 164 - protein, 711 aa, Homo sapiens
MMADAKYVLCRWEKRLWPAKVLARTATSTKNKRRKEYFLAVQILSLEEKIKVKSTEVEILEKSQIEAIASSLASQNEVPAAPLEELAYRRSLRVALDVLSEGSIWSQESSAGTGRADRSLRGKPMEHVSSPCDSNSSSLPRGDVLGSSRPHRRRPCVQQSLSSSFTCEKDPECKVDHKKGLRKSENPRGPLVLPAGGGAQDESGSRIHHKNWTLASKRGGNSAQKASLCLNGSSLSEDDTERDMGSKGGSWAAPSLPSGVREDDPCANAEGHDPGLPLGSLTAPPAPEPSACSEPGECPAKKRPRLDGSQRPPAVQLEPMAAGAAPSPGPGPGPRESVTPRSTARLGPPPSHASADATRCLPCPDSQKLEKECQSSEESMGSNSMRSILEEDEEDEEPPRVLLYHEPRSFEVGMLVWHKHKKYPFWPAVVKSVRQRDKKASVLYIEGHMNPKMKGFTVSLKSLKHFDCKEKQTLLNQAREDFNQDIGWCVSLITDYRVRLGCGSFAGSFLEYYAADISYPVRKSIQQDVLGTKLPQLSKGSPEEPVVGCPLGQRQPCRKMLPDRSRAARDRANQKLVEYIVKAKGAESHLRAILKSRKPSRWLQTFLSSSQYVTCVETYLEDEGQLDLVVKYLQGVYQEVGAKVLQRTNGDRIRFILDVLLPEAIICAISAVDEVDYKTAEEKYIKGPSLSYREKEIFDNQLLEERNRRRR

SEQ ID NO: 165 - protein, 2330 aa, Homo sapiens
MLRGPGPGLLLLAVQCLGTAVPSTGASKSKRQAQQMVQPQSPVAVSQSKPGCYDNGKHYQINQQWERTYLGNALVCTCYGGSRGFNCESKPEAEETCFDKYTGNTYRVGDTYERPKDSMIWDCTCIGAGRGRISCTIANRCHEGGQSYKIGDTWRRPHETGGYMLECVCLGNGKGEWTCKPIAEKCFDHAAGTSYVVGETWEKPYQGWMMVDCTCLGEGSGRITCTSRNRCNDQDTRTSYRIGDTWSKKDNRGNLLQCICTGNGRGEWKCERHTSVQTTSSGSGPFTDVRAAVYQPQPHPQPPPYGHCVTDSGVVYSVGMQWLKTQGNKQMLCTCLGNGVSCQETAVTQTYGGNSNGEPCVLPFTYNGRTFYSCTTEGRQDGHLWCSTTSNYEQDQKYSFCTDHTVLVQTRGGNSNGALCHFPFLYNNHNYTDCTSEGRRDNMKWCGTTQNYDADQKFGFCPMAAHEEICTTNEGVMYRIGDQWDKQHDMGHMMRCTCVGNGRGEWTCIAYSQLRDQCIVDDITYNVNDTFHKRHEEGHMLNCTCFGQGRGRWKCDPVDQCQDSETGTFYQIGDSWEKYVHGVRYQCYCYGRGIGEWHCQPLQTYPSSSGPVEVFITETPSQPNSHPIQWNAPQPSHISKYILRWRPKNSVGRWKEATIPGHLNSYTIKGLKPGVVYEGQLISIQQYGHQEVTRFDFTTTSTSTPVTSNTVTGETTPFSPLVATSESVTEITASSFVVSWVSASDTVSGFRVEYELSEEGDEPQYLDLPSTATSVNIPDLLPGRKYIVNVYQISEDGEQSLILSTSQTTAPDAPPDPTVDQVDDTSIVVRWSRPQAPITGYRIVYSPSVEGSSTELNLPETANSVTLSDLQPGVQYNITIYAVEENQESTPVVIQQETTGTPRSDTVPSPRDLQFVEVTDVKVTIMWTPPESAVTGYRVDVIPVNLPGEHGQRLPISRNTFAEVTGLSPGVTYYFKVFAVSHGRESKPLTAQQTTKLDAPTNLQFVNETDSTVLVRWTPPRAQITGYRLTVGLTRRGQPRQYNVGPSVSKYPLRNLQPASEYTVSLVAIKGNQESPKATGVFTTLQPGSSIPPYNTEVTETTIVITWTPAPRIGFKLGVRPSQGGEAPREVTSDSGSIVVSGLTPGVEYVYTIQVLRDGQERDAPIVNKVVTPLSPPTNLHLEANPDTGVLTVSWERSTTPDITGYRITTTPTNGQQGNSLEEVVHADQSSCTFDNLSPGLEYNVSVYTVKDDKESVPISDTIIPAVPPPTDLRFTNIGPDTMRVTWAPPPSIDLTNFLVRYSPVKNEEDVAELSISPSDNAVVLTNLLPGTEYVVSVSSVYEQHESTPLRGRQKTGLDSPTGIDFSDITANSFTVHWIAPRATITGYRIRHHPEHFSGRPREDRVPHSRNSITLTNLTPGTEYVVSIVALNGREESPLLIGQQSTVSDVPRDLEVVAATPTSLLISWDAPAVTVRYYRITYGETGGNSPVQEFTVPGSKSTATISGLKPGVDYTITVYAVTGRGDSPASSKPISINYRTEIDKPSQMQVTDVQDNSISVKWLPSSSPVTGYRVTTTPKNGPGPTKTKTAGPDQTEMTIEGLQPTVEYVVSVYAQNPSGESQPLVQTAVTNIDRPKGLAFTDVDVDSIKIAWESPQGQVSRYRVTYSSPEDGIHELFPAPDGEEDTAELQGLRPGSEYTVSVVALHDDMESQPLIGTQSTAIPAPTDLKFTQVTPTSLSAQWTPPNVQLTGYRVRVTPKEKTGPMKEINLAPDSSSVVVSGLMVATKYEVSVYALKDTLTSRPAQGVVTTLENVSPPRRARVTDATETTITISWRTKTETITGFQVDAVPANGQTPIQRTIKPDVRSYTITGLQPGTDYKIYLYTLNDNARSSPVVIDASTAIDAPSNLRFLATTPNSLLVSWQPPRARITGYIIKYEKPGSPPREVVPRPRPGVTEATITGLEPGTEYTIYVIALKNNQKSEPLIGRKKTVQKTPFVTHPGYDTGNGIQLPGTSGQQPSVGQQMIFEEHGFRRTTPPTTATPIRHRPRPYPPNVGQEALSQTTISWAPFQDTSEYIISCHPVGTDEEPLQFRVPGTSTSATLTGLTRGATYNIIVEALKDQQRHKVREEVVTVGNSVNEGLNQPTDDSCFDPYTVSHYAVGDEWERMSESGFKLLCQCLGFGSGHFRCDSSRWCHDNGVNYKIGEKWDRQGENGQMMSCTCLGNGKGEFKCDPHEATCYDDGKTYHVGEQWQKEYLGAICSCTCFGGQRGWRCDNCRRPGGEPSPEGTTGQSYNQYSQRYHQRTNTNVNCPIECFMPLDVQADREDSRE

SEQ ID NO: 166 - protein, 346 aa, Homo sapiens
MPRGQKSKLRAREKRQRTRGQTQDLKVGQPTAAEKEESPSSSSSVLRDTASSSLAFGIPQEPQREPPTTSAAAAMSCTGSDKGDESQDEENASSSQASTSTERSLKDSLTRKTKMLVQFLLYKYKMKEPTTKAEMLKIISKKYKEHFPEIFRKVSQRTELVFGLALKEVNPTTHSYILVSMLGPNDGNQSSAWTLPRNGLLMPLLSVIFLNGNCAREEEIWEFLNMLGIYDGKRHLIFGEPRKLITQDLVQEKYLEYQQVPNSDPPRYQFLWGPRAHAETSKMKVLEFLAKVNDTTPNNFPLLYEEALRDEEERAGARPRVAARRGTTAMTSAYSRATSSSSSQPM

SEQ ID NO: 167 - protein, 1441 aa, Homo sapiens
MSGLGDSSSDPANPDSHKRKGSPCDTLASSTEKRRREQENKYLEELAELLSANISDIDSLSVKPDKCKILKKTVDQIQLMKRMEQEKSTTDDDVQKSDISSSSQGVIEKESLGPLLLEALDGFFFVVNCEGRIVFVSENVTSYLGYNQEELMNTSVYSILHVGDHAEFVKNLLPKSLVNGVPWPQEATRRNSHTFNCRMLIHPPDEPGTENQEACQRYEVMQCFTVSQPKSIQEDGEDFQSCLICIARRLPRPPAITGVESFMTKQDTTGKIISIDTSSLRAAGRTGWEDLVRKCIYAFFQPQGREPSYARQLFQEVMTRGTASSPSYRFILNDGTMLSAHTKCKLCYPQSPDMQPFIMGIHIIDREHSGLSPQDDTNSGMSIPRVNPSVNPSISPAHGVARSSTLPPSNSNMVSTRINRQQSSDLHSSSHSNSSNSQGSFGCSPGSQIVANVALNQGQASSQSSNPSLNLNNSPMEGTGISLAQFMSPRRQVTSGLATRPRMPNNSFPPNISTLSSPVGMTSSACNNNNRSYSNIPVTSLQGMNEGPNNSVGFSASSPVLRQMSSQNSPSRLNIQPAKAESKDNKEIASILNEMIQSDNSSSDGKPLDSGLLHNNDRLSDGDSKYSQTSHKLVQLLTTTAEQQLRHADIDTSCKDVLSCTGTSNSASANSSGGSCPSSHSSLTERHKILHRLLQEGSPSDITTLSVEPDKKDSASTSVSVTGQVQGNSSIKLELDASKKKESKDHQLLRYLLDKDEKDLRSTPNLSLDDVKVKVEKKEQMDPCNTNPTPMTKPTPEEIKLEAQSQFTADLDQFDQLLPTLEKAAQLPGLCETDRMDGAVTSVTIKSEILPASLQSATARPTSRLNRLPELELEAIDNQFGQPGTGDQIPWTNNTVTAINQSKSEDQCISSQLDELLCPPTTVEGRNDEKALLEQLVSFLSGKDETELAELDRALGIDKLVQGGGLDVLSERFPPQQATPPLIMEERPNLYSQPYSSPSPTANLPSPFQGMVRQKPSLGTMPVQVTPPRGAFSPGMGMQPRQTLNRPPAAPNQLRLQLQQRLQGQQQLIHQNRQAILNQFAATAPVGINMRSGMQQQITPQPPLNAQMLAQRQRELYSQQHRQRQLIQQQRAMLMRQQSFGNNLPPSSGLPVQMGNPRLPQGAPQQFPYPPNYGTNPGTPPASTSPFSQLAANPEASLANRNSMVSRGMTGNIGGQFGTGINPQMQQNVFQYPGAGMVPQGEANFAPSLSPGSSMVPMPIPPPQSSLLQQTPPASGYQSPDMKAWQQGAIGNNNVFSQAVQNQPTPAQPGVYNNMSITVSMAGGNTNVQNMNPMMAQMQMSSLQMPGMNTVCPEQINDPALRHTGLYCNQLSSTDLLKTEADGTQQVQQVQVFADVQCTVNLVGGDPYLNQPGPLGTQKPTSGPQTPQAQQKSLLQQLLTE

SEQ ID NO: 168 - protein, 303 aa, Homo sapiens
MDAIKKKMQMLKLDKENAIDRAEQAEADKKQAEDRCKQLEEEQQALQKKLKGTEDEVEKYSESVKEAQEKLEQAEKKATDAEADVASLNRRIQLVEEELDRAQERLATALQKLEEAEKAADESERGMKVIENRAMKDEEKMELQEMQLKEAKHIAEDSDRKYEEVARKLVILEGELERSEERAEVAESRARQLEEELRTMDQALKSLMASEEEVVTPLNLSGQWRLLSAHLPSVSAPQAALSQLLGIRKGLGLLSPACCHSHNFALLFSPPPVPCCAISTVWLRCALTPCPPRHTPPAVNVGT

SEQ ID NO: 169 - protein, 400 aa, Homo sapiens
MTSYSYRQSSATSSFGGLGGGSVRFGPGVAFRAPSIHGGSGGRGVSVSSARFVSSSSSGAYGGGYGGVLTASDGLLAGNEKLTMQNLNDRLASYLDKVRALEAANGELEVKIRDWYQKQGPGPSRDYSHYYTTIQDLRDKILGATIENSRIVLQIDNARLAADDFRTKFETEQALRMSVEADINGLRRVLDELTLARTDLEMQIEGLKEELAYLKKNHEEEISTLRGQVGGQVSVEVDSAPGTDLAKILSDMRSQYEVMAEQNRKDAEAWFTSRTEELNREVAGHTEQLQMSRSEVTDLRRTLQGLEIELQSQLSMKAALEDTLAETEARFGAQLAHIQALISGIEAQLGDVRADSERQNQEYQRLMDIKSRLEQEIATYRSLLEGQEDHYNNLSASKVL
